(19) United States
(12) Patent Application Publication
(10) Pub. No.: US 2022/0056137 A1
(43) Pub. Date: Feb. 24, 2022

(54) Anti-PD-L1 Binding Proteins and Methods of Use Thereof

(71) Applicant: GigaGen, Inc., South San Francisco, CA (US)

(72) Inventors: David Scott Johnson, San Francisco, CA (US); Adam Shultz Adler, Belmont, CA (US); Rena Aviva Mizrahi, Pacifica, CA (US); Yoong Wearn Lim, South San Francisco, CA (US); Michael Asensio, South San Francisco, CA (US)

(21) Appl. No.: 17/418,768

(22) PCT Filed: Dec. 27, 2019
(86) PCT No.: PCT/US2019/068826

§ 371 Date: Jun. 25, 2021

Related U.S. Application Data
(60) Provisional application No. 62/785,667, filed on Dec. 27, 2018.

(51) Int. Cl. C07K 16/28; A61K 45/06

(52) U.S. Cl. CPC C07K 16/2827; A61K 45/06; C07K 2317/76; C07K 2317/565; C07K 2317/622; C07K 2317/92

(57) ABSTRACT

Provided herein are antigen-binding proteins (ABPs) that selectively bind to PD-L1 and its isoforms and homologs, and compositions comprising the ABPs. Also provided are methods of using the ABPs, such as therapeutic and diagnostic methods.

### 1. CROSS REFERENCE TO RELATED APPLICATIONS

[0001] This application claims priority to and the benefit of U.S. Provisional Patent Application No. 62/785,667, filed on Dec. 27, 2018, the entire contents of which are incorporated by reference herein.

### 2. SEQUENCE LISTING

[0002] The instant application contains a Sequence Listing with 9254 sequences which has been submitted via EFS-Web and is hereby incorporated by reference in its entirety. Said ASCII copy, created on Dec. 20, 2019, is named GGN-012WO_SL.txt, and is 835,590 bytes in size.

### 3. FIELD

[0003] Provided herein are antigen-binding proteins (ABPs) with binding specificity for PD-L1 (programmed death-ligand 1) and compositions comprising such ABPs, including pharmaceutical compositions, diagnostic compositions, and kits. Also provided are methods of making PD-L1 ABPs, and methods of using PD-L1 ABPs, for example, for therapeutic purposes, diagnostic purposes, and research purposes.

### 4. BACKGROUND

[0004] PD-L1, also known as CD274 (cluster of differentiation 274) and B7 homolog 1 (B7-H1), is a cell surface receptor that suppresses T cell inflammatory activity. PD-L1 is a member of the B7 family of molecules involved in immune regulation and is over-expressed in certain types of T cells, many solid tumor cells, cancer stem-like cells, supporting vasculature, and stroma. The binding of PD-L1 to PD-1 or B7.1 transmits an inhibitory signal that reduces the proliferation of antigen-specific T-cells, while simultaneously reducing apoptosis in regulatory T cells (anti-inflammatory, suppressive T cells). PD-L1 is therefore vitally important for downregulating the immune responses and promoting self-tolerance by suppressing T cell inflammatory activity. This activity prevents the immune system from killing cancer cells.

[0005] Tumor cells hijack the PD-L1 pathway by up-regulating PD-L1 and thus suppress the anti-tumor immune response. Recently, it has been proposed that PD-L1 inhibitors could antagonize binding of PD-L1 to its ligands, thereby activating the immune system to attack tumors. PD-L1 antibodies could also be used to induce antibody-dependent cell-mediated cytotoxicity (ADCC) cells specific to the tumor microenvironment, thus directly killing the tumor. PD-L1 antibodies could therefore be used to treat some types of cancer.

[0006] Though the biological function of PD-L1 is still being elucidated, the molecule is also a promising target for therapy of autoimmune disease. Because PD-L1 has both immune stimulatory and immune inhibitory properties, drugs that agonize or antagonize PD-L1 could be used to treat autoimmune diseases.

[0007] Thus, there is a need for developing PD-L1 ABPs that can be used for treatment, diagnosis, and research of various diseases, including cancer and autoimmune disease.

### 5. SUMMARY

[0008] Provided herein are novel ABPs with binding specificity for PD-L1 and methods of using such ABPs. The PD-L1 is a human PD-L1 (SEQ ID: 7001) or a fragment of the human PD-L1.

[0009] The ABP can comprise an antibody. In some embodiments, the antibody is a monoclonal antibody. In some embodiments, the antibody is a chimeric antibody. In some embodiments, the antibody is a humanized antibody. In some embodiments, the antibody is a human antibody. In some embodiments, the ABP comprises an antibody fragment. In some embodiments, the ABP comprises an alternative scaffold. In some embodiments, the ABPs comprises a single-chain variable fragment (scFv).

[0010] The ABPs provided herein can induce various biological effects associated with inhibition or activation of PD-L1. In some embodiments, an ABP provided herein prevents binding between PD-L1 and its ligands. In some embodiments, an ABP provided herein prevents inhibition of an effector T cell by a Treg. In some embodiments, the ABP directly kills tumor cells by ADCC, for example mediated by binding of NK cell-expressed CD16 to the ABP Fc domain. In some embodiments, the ABP inhibits the suppression of an effector T cell by a regulatory T cell by directly killing tumor cells.

[0011] Also provided are kits comprising one or more of the pharmaceutical compositions comprising the ABPs, and instructions for use of the pharmaceutical composition.

[0012] Also provided are isolated polynucleotides encoding the ABPs provided herein, and portions thereof.

[0013] Also provided are vectors comprising such polynucleotides.

[0014] Also provided are recombinant host cells comprising such polynucleotides and recombinant host cells comprising such vectors.

[0015] Also provided are methods of producing the ABP using the polynucleotides, vectors, or host cells provided herein.

[0016] Also provided are pharmaceutical compositions comprising the ABPs and a pharmaceutically acceptable excipient.

[0017] More specifically, the present disclosure provides an isolated antigen binding protein (ABP) that specifically binds a human programmed death-ligand 1 (PD-L1), comprising: (a) a CDR3-L having a sequence selected from SEQ ID NOS: 3001-3025 and a CDR3-H having a sequence selected from SEQ ID NOS: 6001-6025; or (b) a CDR3-L having a sequence selected from SEQ ID NOS: 8612-8764 and a CDR3-H having a sequence selected from SEQ ID NOS: 9071-9223; or (c) a CDR3-L having a sequence of the CD3-L of any one of the clones in the library deposited under ATCC Accession No. PTA-125513 and a CDR3-L having a sequence of the CD3-L of any one of the clones in the library deposited under ATCC Accession No. PTA-125513. In some embodiments, the CDR3-L and the CDR3-H are a cognate pair.

[0018] In some embodiments, the ABP comprises (a) a CDR1-L having a sequence selected from SEQ ID NOS: 1001-1025 and a CDR2-L having a sequence selected from SEQ ID NOS: 2001-2025; and a CDR1-H having a sequence selected from SEQ ID NOS: 4001-4025; and a CDR2-H having a sequence selected from SEQ ID NOS: 5001-5025; or (b) a CDR1-L having a sequence selected from SEQ ID NOS: 8306-8458; and a CDR2-L having a sequence selected from SEQ ID NOS: 8459-8611 and a CDR1-H having a sequence selected from SEQ ID NOS: 8765-8917; and a CDR2-H having a sequence selected from SEQ ID NOS: 8918-9070; or (c) a CDR1-L having a sequence selected from a CDR1-L of any one of the clones in the library deposited under ATCC Accession No. PTA-125513; and a CDR2-L having a sequence selected from a CDR2-L of any one of the clones in the library deposited under ATCC Accession No. PTA-125513; and a CDR1-H having a sequence selected from a CDR1-H of any one of the clones in the library deposited under ATCC Accession No. PTA-125513; and a CDR2-H having a sequence selected from a CDR2-H of any one of the clones in the library deposited under ATCC Accession No. PTA-125513.

[0019] In some embodiments, the ABP comprises a CDR1-L, a CDR2-L, a CDR3-L, a CDR1-H, a CDR2-H and a CDR3-H, wherein the CDR1-L consists of SEQ ID NO: 1001, the CDR2-L consists of SEQ ID NO: 2001, the CDR3-L consists of SEQ ID NO: 3001, the CDR1-H consists of SEQ ID NO: 4001, the CDR2-H consists of SEQ ID NO: 5001 and the CDR3-H consists of SEQ ID NO: 6001; or the CDR1-L consists of SEQ ID NO: 1002, CDR2-L consists of SEQ ID NO: 2002, the CDR3-L consists of SEQ ID NO: 3002, the CDR1-H consists of SEQ ID NO: 4002, the CDR2-H consists of SEQ ID NO: 5002 and the CDR3-H consists of SEQ ID NO: 6002; or the CDR1-L consists of SEQ ID NO: 1003, the CDR2-L consists of SEQ ID NO: 2003, the CDR3-L consists of SEQ ID NO: 3003, the CDR1-H consists of SEQ ID NO: 4003, the CDR2-H consists of SEQ ID NO: 5003 and the CDR3-H consists of SEQ ID NO: 6003; or the CDR1-L consists of SEQ ID NO: 1004, the CDR2-L consists of SEQ ID NO: 2004, the CDR3-L consists of SEQ ID NO: 3004, the CDR1-H consists of SEQ ID NO: 4004, the CDR2-H consists of SEQ ID NO: 5004 and the CDR3-H consists of SEQ ID NO: 6004; or the CDR1-L consists of SEQ ID NO: 1005, the CDR2-L consists of SEQ ID NO: 2005, the CDR3-L consists of SEQ ID NO: 3005, the CDR1-H consists of SEQ ID NO: 4005, the CDR2-H consists of SEQ ID NO: 5005 and the CDR3-H consists of SEQ ID NO: 6005; or the CDR1-L consists of SEQ ID NO: 1006, the CDR2-L consists of SEQ ID NO: 2006, the CDR3-L consists of SEQ ID NO: 3006, the CDR1-H consists of SEQ ID NO: 4006, the CDR2-H consists of SEQ ID NO: 5006 and the CDR3-H consists of SEQ ID NO: 6006; or the CDR1-L consists of SEQ ID NO: 1007, the CDR2-L consists of SEQ ID NO: 2007, the CDR3-L consists of SEQ ID NO: 3007, the CDR1-H consists of SEQ ID NO: 4007, the CDR2-H consists of SEQ ID NO: 5007 and the CDR3-H consists of SEQ ID NO: 6007; or the CDR1-L consists of SEQ ID NO: 1008, the CDR2-L consists of SEQ ID NO: 2008, the CDR3-L consists of SEQ ID NO: 3008, the CDR1-H consists of SEQ ID NO: 4008, the CDR2-H consists of SEQ ID NO: 5008 and the CDR3-H consists of SEQ ID NO: 6008 or the CDR1-L consists of SEQ ID NO: 1009, the CDR2-L consists of SEQ ID NO: 2009, the CDR3-L consists of SEQ ID NO: 3009, the CDR1-H consists of SEQ ID NO: 4009, the CDR2-H consists of SEQ ID NO: 5009 and the CDR3-H consists of SEQ ID NO: 6009; or the CDR1-L consists of SEQ ID NO: 1010, the CDR2-L consists of SEQ ID NO: 2010, the CDR3-L consists of SEQ ID NO: 3010, the CDR1-H consists of SEQ ID NO: 4010, the CDR2-H consists of SEQ ID NO: 5010 and the CDR3-H consists of SEQ ID NO: 6010; or the CDR1-L consists of SEQ ID NO: 1011, the CDR2-L consists of SEQ ID NO: 2011, the CDR3-L consists of SEQ ID NO: 3011, the CDR1-H consists of SEQ ID NO: 4011, the CDR2-H consists of SEQ ID NO: 5011 and the CDR3-H consists of SEQ ID NO: 6011; or the CDR1-L consists of SEQ ID NO: 1012, the CDR2-L consists of SEQ ID NO: 2012, the CDR3-L consists of SEQ ID NO: 3012, the CDR1-H consists of SEQ ID NO: 4012, the CDR2-H consists of SEQ ID NO: 5012 and the CDR3-H consists of SEQ ID NO: 6012; or the CDR1-L consists of SEQ ID NO: 1013, the CDR2-L consists of SEQ ID NO: 2013, the CDR3-L consists of SEQ ID NO: 3013, the CDR1-H consists of SEQ ID NO: 4013, the CDR2-H consists of SEQ ID NO: 5013 and the CDR3-H consists of SEQ ID NO: 6013; or the CDR1-L consists of SEQ ID NO: 1014, the CDR2-L consists of SEQ ID NO: 2014, the CDR3-L consists of SEQ ID NO: 3014, the CDR1-H consists of SEQ ID NO: 4014, the CDR2-H consists of SEQ ID NO: 5014 and the CDR3-H consists of SEQ ID NO: 6014; or the CDR1-L consists of SEQ ID NO: 1015, the CDR2-L consists of SEQ ID NO: 2015, the CDR3-L consists of SEQ ID NO: 3015, the CDR1-H consists of SEQ ID NO: 4015, the CDR2-H consists of SEQ ID NO: 5015 and the CDR3-H consists of SEQ ID NO: 6015; or the CDR1-L consists of SEQ ID NO: 1016, the CDR2-L consists of SEQ ID NO: 2016, the CDR3-L consists of SEQ ID NO: 3016, the CDR1-H consists of SEQ ID NO: 4016, the CDR2-H consists of SEQ ID NO: 5016 and the CDR3-H consists of SEQ ID NO: 6016; or the CDR1-L consists of SEQ ID NO: 1017, the CDR2-L consists of SEQ ID NO: 2017, the CDR3-L consists of SEQ ID NO: 3017, the CDR1-H consists of SEQ ID NO: 4017, the CDR2-H consists of SEQ ID NO: 5017 and the CDR3-H consists of SEQ ID NO: 6017; or the CDR1-L consists of SEQ ID NO: 1018, the CDR2-L consists of SEQ ID NO: 2018, the CDR3-L consists of SEQ ID NO: 3018, the CDR1-H consists of SEQ ID NO: 4018, the CDR2-H consists of SEQ ID NO: 5018 and the CDR3-H consists of SEQ ID NO: 6018; or the CDR1-L consists of SEQ ID NO: 1019, the CDR2-L consists of SEQ ID NO: 2019, the CDR3-L consists of SEQ ID NO: 3019, the CDR1-H consists of SEQ ID NO: 4019, the CDR2-H consists of SEQ ID NO: 5019 and the CDR3-H consists of SEQ ID NO: 6019; or the CDR1-L consists of SEQ ID NO: 1020, the CDR2-L consists of SEQ ID NO: 2020, the CDR3-L consists of SEQ ID NO: 3020, the CDR1-H consists of SEQ ID NO: 4020, the CDR2-H consists of SEQ ID NO: 5020 and the CDR3-H consists of SEQ ID NO: 6020; or the CDR1-L consists of SEQ ID NO: 1021, the CDR2-L consists of SEQ ID NO: 2021, the CDR3-L consists of SEQ ID NO: 3021, the CDR1-H consists of SEQ ID NO: 4021, the CDR2-H consists of SEQ ID NO: 5021 and the CDR3-H consists of SEQ ID NO: 6021; or the CDR1-L consists of SEQ ID NO: 1022, the CDR2-L consists of SEQ ID NO: 2022, the CDR3-L consists of SEQ ID NO: 3022, the CDR1-H consists of SEQ ID NO: 4022, the CDR2-H consists of SEQ ID NO: 5022 and the CDR3-H consists of SEQ ID NO: 6022; or the CDR1-L consists of SEQ ID NO: 1023, the CDR2-L consists of SEQ ID NO: 2023, the CDR3-L consists of SEQ ID NO: 3023, the CDR1-H consists of SEQ ID NO: 4023, the CDR2-H consists of SEQ ID NO: 5023 and the CDR3-H consists of SEQ ID NO: 6023; or the CDR1-L consists of SEQ ID NO: 1024, the CDR2-L consists of SEQ ID NO: 2024, the CDR3-L consists of SEQ ID NO: 3024, the CDR1-H consists of SEQ ID NO: 4024, the CDR2-H consists of SEQ ID NO: 5024 and the CDR3-H consists of SEQ ID NO: 6024; or the CDR1-L consists of SEQ ID NO: 1025, the CDR2-L consists of SEQ ID NO: 2025, the CDR3-L consists of SEQ ID NO: 3025, the CDR1-H consists of SEQ ID NO: 4025, the CDR2-H consists of SEQ ID NO: 5025 and the CDR3-H consists of SEQ ID NO: 6025.

[0020] In some embodiments, the ABP comprises a variable light chain (V_{L}) comprising a sequence at least 97% identical to a sequence selected from SEQ ID NOS: 1-25 and a variable heavy chain (V_{H}) comprising a sequence at least 97% identical to a sequence selected from SEQ ID NOS: 101-125; or a variable light chain (V_{L}) comprising a sequence at least 97% identical to a sequence selected from SEQ ID NOS: 8000-8152 and a variable heavy chain (V_{H}) comprising a sequence at least 97% identical to a sequence selected from SEQ ID NOS: 8153-8305; or a variable light chain (V_{L}) comprising a sequence at least 97% identical to a V_{L} sequence of any one of the clones in the library deposited under ATCC Accession No. PTA-125513 and a variable heavy chain (V_{H}) comprising a sequence at least 97% identical to a V_{H} sequence of any one of the clones in the library deposited under ATCC Accession No. PTA-125513. In some embodiments, the V_{L} and the V_{H} are a cognate pair.

[0021] In some embodiments, the ABP of claim 1, comprises a variable light chain (V_{L}) comprising a sequence selected from SEQ ID NOS: 1-25 and a variable heavy chain (V_{H}) comprising a a sequence selected from SEQ ID NOS: 101-125 or a variable light chain (V_{L}) comprising a sequence selected from SEQ ID NOS: 8000-8152 and a variable heavy chain (V_{H}) comprising a sequence selected from SEQ ID NOS: 8153-8305; or a variable light chain (V_{L}) comprising a V_{L} sequence of any one of the clones in the library deposited under ATCC Accession No. PTA-125513 and a variable heavy chain (V_{H}) comprising a V_{H} sequence of any one of the clones in the library deposited under ATCC Accession No. PTA-125513. In some embodiments, the V_{L} and the V_{H} are a cognate pair.

[0022] In some embodiments, the ABP comprises an scFv or a full length monoclonal antibody. In some embodiments, the ABP comprises an immunoglobulin constant region.

[0023] In some embodiments, the ABP binds human PD-L1 with a K_{D} of less than 500 nM, as measured by bio-layer interferometry or surface plasmon resonance. In some embodiments, the ABP binds human PD-L1 with a K_{D} of less than 200 nM, as measured by bio-layer interferometry or surface plasmon resonance. In some embodiments, the ABP binds human PD-L1 with a K_{D} of less than 25 nM, as measured by bio-layer interferometry or surface plasmon resonance. In some embodiments, the ABP binds to human PD-L1 on a cell surface with a K_{D} of less than 25 nM.

[0024] Another aspect of the present disclosure provides a pharmaceutical composition comprising any one of the disclosed ABPs and an excipient.

[0025] Another aspect of the present disclosure provides a method of treating a disease comprising the step of: administering to a subject in need thereof an effective amount an ABP as disclosed herein or a pharmaceutical composition as disclosed herein. In some embodiments, the disease is selected from the group consisting of cancer, AIDS, Alzheimer's disease and viral or bacterial infection. In some embodiments, the method further comprises the step of administering one or more additional therapeutic agents to the subject. In some embodiments, the additional therapeutic agent is selected from CTLA-4 inhibitor, TIGIT inhibitor, a chemotherapy agent, an immune-stimulatory agent, radiation, a cytokine, a polynucleotide encoding a cytokine and a combination thereof.

### 6. BRIEF DESCRIPTION OF THE DRAWINGS

[0026] FIG. 1 summarized the method of generating scFv libraries from B cells isolated from fully human mice and selecting a B cell expressing an antibody having high-affinity to the antigen. FIG. 1 discloses SEQ ID NOS 9227-9254, respectively, in order of appearance.

[0027] FIG. 2 illustrates scFv amplification procedure. First, a mixture of primers directed against the IgK C region, the IgG C region, and all V regions is used to separately amplify IgK and IgH. Second, the V-H and C-K primers contain a region of complementarity that results in the formation of an overlap extension amplicon that is a fusion product between IgK and IgH. The region of complementarity comprises a DNA sequence that encodes a Gly-Ser rich scFv linker sequence. Third, semi-nested PCR is performed to add adapters for Illumina sequencing or yeast display.

[0028] FIG. 3 includes a plot showing the luminescence against concentration of anti-PDL1 treatment from the PD-L1 blocking.

[0029] FIG. 4 includes a schematic showing the monoclonal antibodies in their epitope bins.

### 7. DETAILED DESCRIPTION

[0030] 7.1. Definitions

[0031] Unless otherwise defined herein, scientific and technical terms used in connection with the present disclosure shall have the meanings that are commonly understood by those of ordinary skill in the art. Further, unless otherwise required by context, singular terms shall include pluralities and plural terms shall include the singular. Generally, nomenclatures used in connection with, and techniques of, cell and tissue culture, molecular biology, immunology, microbiology, genetics and protein and nucleic acid chemistry and hybridization described herein are those well-known and commonly used in the art. The methods and techniques of the present disclosure are generally performed according to conventional methods well known in the art and as described in various general and more specific references that are cited and discussed throughout the present specification unless otherwise indicated. See, e.g., Sambrook et al. Molecular Cloning: A Laboratory Manual, 2d ed., Cold Spring Harbor Laboratory Press, Cold Spring Harbor, N.Y. (1989) and Ausubel et al., Current Protocols in Molecular Biology, Greene Publishing Associates (1992), and Harlow and Lane Antibodies: A Laboratory Manual Cold Spring Harbor Laboratory Press, Cold Spring Harbor, N.Y. (1990), which are incorporated herein by reference. Enzymatic reactions and purification techniques are performed according to manufacturer's specifications, as commonly accomplished in the art or as described herein. The terminology used in connection with, and the laboratory procedures and techniques of, analytical chemistry, synthetic organic chemistry, and medicinal and pharmaceutical chemistry described herein are those well-known and commonly used in the art. Standard techniques can be used for chemical syntheses, chemical analyses, pharmaceutical preparation, formulation, and delivery, and treatment of patients.

[0032] The following terms, unless otherwise indicated, shall be understood to have the following meanings:

[0033] The terms “PD-L1,” “PD-L1 protein,” and “PD-L1 antigen” are used interchangeably herein to refer to human PD-L1, or any variants (e.g., splice variants and allelic variants), isoforms, and species homologs of human PD-L1 that are naturally expressed by cells, or that are expressed by cells transfected with a pd-l1 gene. In some aspects, the PD-L1 protein is a PD-L1 protein naturally expressed by a primate (e.g., a monkey or a human), a rodent (e.g., a mouse or a rat), a dog, a camel, a cat, a cow, a goat, a horse, or a sheep. In some aspects, the PD-L1 protein is human PD-L1 (hPD-L1; SEQ ID NO: 7001).

[0034] The term “immunoglobulin” refers to a class of structurally related proteins generally comprising two pairs of polypeptide chains: one pair of light (L) chains and one pair of heavy (H) chains. In an “intact immunoglobulin,” all four of these chains are interconnected by disulfide bonds. The structure of immunoglobulins has been well characterized. See, e.g., Paul, Fundamental Immunology 7th ed., Ch. 5 (2013) Lippincott Williams & Wilkins, Philadelphia, Pa. Briefly, each heavy chain typically comprises a heavy chain variable region (V_{H}) and a heavy chain constant region (C_{H}). The heavy chain constant region typically comprises three domains, abbreviated C_{H1}, C_{H2}, and C_{H3}. Each light chain typically comprises a light chain variable region (V_{L}) and a light chain constant region. The light chain constant region typically comprises one domain, abbreviated C_{L}.

[0035] The term “antigen-binding protein” (ABP) refers to a protein comprising one or more antigen-binding domains that specifically bind to an antigen or epitope. In some embodiments, the antigen-binding domain binds the antigen or epitope with specificity and affinity similar to that of naturally occurring antibodies. In some embodiments, the ABP comprises an antibody. In some embodiments, the ABP consists of an antibody. In some embodiments, the ABP consists essentially of an antibody. In some embodiments, the ABP comprises an alternative scaffold. In some embodiments, the ABP consists of an alternative scaffold. In some embodiments, the ABP consists essentially of an alternative scaffold. In some embodiments, the ABP comprises an antibody fragment. In some embodiments, the ABP consists of an antibody fragment. In some embodiments, the ABP consists essentially of an antibody fragment. A “PD-L1 ABP,” “anti-PD-L1 ABP,” or “PD-L1-specific ABP” is an ABP, as provided herein, which specifically binds to the antigen PD-L1. In some embodiments, the ABP binds the extracellular domain of PD-L1. In certain embodiments, a PD-L1 ABP provided herein binds to an epitope of PD-L1 that is conserved between or among PD-L1 proteins from different species.

[0036] The term “antibody” is used herein in its broadest sense and includes certain types of immunoglobulin molecules comprising one or more antigen-binding domains that specifically bind to an antigen or epitope. An antibody specifically includes intact antibodies (e.g., intact immunoglobulins), antibody fragments, and multi-specific antibodies. One example of an antigen-binding domain is an antigen-binding domain formed by a V_{H}-V_{L} dimer. An antibody is one type of ABP.

[0037] The term “alternative scaffold” refers to a molecule in which one or more regions may be diversified to produce one or more antigen-binding domains that specifically bind to an antigen or epitope. In some embodiments, the antigen-binding domain binds the antigen or epitope with specificity and affinity similar to that of naturally occurring antibodies. Exemplary alternative scaffolds include those derived from fibronectin (e.g., Adnectins™), the β-sandwich (e.g., iMab), lipocalin (e.g., Anticalins) EETI-II/AGRP, BPTI/LACI-D1/ITI-D2 (e.g., Kunitz domains), thioredoxin peptide aptamers, protein A (e.g., Affibody®, ankyrin repeats (e.g., DARPins), gamma-B-crystallin/ubiquitin (e.g., Affilins), CTLD₃ (e.g., Tetranectins), Fynomers, and (LDLR-A module) (e.g., Avimers). Additional information on alternative scaffolds is provided in Binz et al., Nat. Biotechnol., 2005 23:1257-1268; Skerra, Current Opin. in Biotech., 2007 18:295-304; and Silacci et al., J. Biol. Chem., 2014, 289:14392-14398; each of which is incorporated by reference in its entirety. An alternative scaffold is one type of ABP.

[0038] The term “antigen-binding domain” means the portion of an ABP that is capable of specifically binding to an antigen or epitope.

[0039] The terms “full length antibody,” “intact antibody,” and “whole antibody” are used herein interchangeably to refer to an antibody having a structure substantially similar to a naturally occurring antibody structure and having heavy chains that comprise an Fc region.

[0040] The term “Fc region” means the C-terminal region of an immunoglobulin heavy chain that, in naturally occurring antibodies, interacts with Fc receptors and certain proteins of the complement system. The structures of the Fc regions of various immunoglobulins, and the glycosylation sites contained therein, are known in the art. See Schroeder and Cavacini, J. Allergy Clin. Immunol., 2010, 125:S41-52, incorporated by reference in its entirety. The Fc region may be a naturally occurring Fc region, or an Fc region modified as described elsewhere in this disclosure.

[0041] The V_{H} and V_{L} regions may be further subdivided into regions of hypervariability (“hypervariable regions (HVRs)”) also called “complementarity determining regions” (CDRs)) interspersed with regions that are more conserved. The more conserved regions are called framework regions (FRs). Each V_{H} and V_{L} generally comprises three CDRs and four FRs, arranged in the following order (from N-terminus to C-terminus): FR1-CDR1-FR2-CDR2-FR3-CDR3-FR4. The CDRs are involved in antigen binding, and influence antigen specificity and binding affinity of the antibody. See Kabat et al., Sequences of Proteins of Immunological Interest 5th ed. (1991) Public Health Service, National Institutes of Health, Bethesda, Md., incorporated by reference in its entirety.

[0042] The light chain from any vertebrate species can be assigned to one of two types, called kappa (κ) and lambda (λ), based on the sequence of its constant domain.

[0043] The heavy chain from any vertebrate species can be assigned to one of five different classes (or isotypes): IgA, IgD, IgE, IgG, and IgM. These classes are also designated α, β, ε, γ, and μ, respectively. The IgG and IgA classes are further divided into subclasses on the basis of differences in sequence and function. Humans express the following subclasses: IgG1, IgG2, IgG3, IgG4, IgA1, and IgA2.

[0044] The amino acid sequence boundaries of a CDR can be determined by one of skill in the art using any of a number of known numbering schemes, including those described by Kabat et al., supra (“Kabat” numbering scheme); A1-Lazikani et al., 1997, J. Mol. Biol., 273:927-948 (“Chothia” numbering scheme); MacCallum et al., 1996, J. Mol. Biol. 262:732-745 (“Contact” numbering scheme); Lefranc et al., Dev. Comp. Immunol., 2003, 27:55-77 (“IMGT” numbering scheme); and Honegge and Plückthun, J. Mol. Biol., 2001, 309:657-70 (“AHo” numbering scheme); each of which is incorporated by reference in its entirety.

[0045] Table 1 provides the positions of CDR1-L (CDR1 of V_{L}), CDR2-L (CDR2 of V_{L}), CDR3-L (CDR3 of V_{L}), CDR1-H (CDR1 of V_{H}), CDR2-H (CDR2 of V_{H}), and CDR3-H (CDR3 of V_{H}), as identified by the Kabat and Chothia schemes. For CDR1-H, residue numbering is provided using both the Kabat and Chothia numbering schemes.

[0046] CDRs may be assigned, for example, using antibody numbering software, such as Abnum, available at www.bioinf.org.uk/abs/abnum/, and described in Abhinandan and Martin, Immunology, 2008, 45:3832-3839, incorporated by reference in its entirety.

TABLE 1
Residues in CDRs according to Kabat and Chothia numbering schemes.

| CDR | Kabat | Chothia |
|---|---|---|
| CDR1-L | 24-34 | 24-34 |
| CDR2-L | 50-56 | 50-56 |
| CDR3-L | 89-97 | 89-97 |
| CDR1-H (Kabat Numbering) | 31-35B | 26-32 or 34* |
| CDR1-H (Chothia Numbering) | 31-35 | 26-32 |
| CDR2-H | 50-65 | 52-56 |
| CDR3-H | 95-102 | 95-102 |

*The C-terminus of CDR1-H, when numbered using the Kabat numbering convention, varies between 32 and 34, depending on the length of the CDR.

[0047] The “EU numbering scheme” is generally used when referring to a residue in an antibody heavy chain constant region (e.g., as reported in Kabat et al., supra).

[0048] An “antibody fragment” comprises a portion of an intact antibody, such as the antigen-binding or variable region of an intact antibody. Antibody fragments include, for example, Fv fragments, Fab fragments, F(ab′)₂ fragments, Fab′ fragments, scFv (sFv) fragments, and scFv-Fc fragments.

[0049] “Fv” fragments comprise a non-covalently-linked dimer of one heavy chain variable domain and one light chain variable domain.

[0050] “Fab” fragments comprise, in addition to the heavy and light chain variable domains, the constant domain of the light chain and the first constant domain (C_{H1}) of the heavy chain. Fab fragments may be generated, for example, by recombinant methods or by papain digestion of a full-length antibody.

[0051] “F(ab′)₂” fragments contain two Fab′ fragments joined, near the hinge region, by disulfide bonds. F(ab′)₂ fragments may be generated, for example, by recombinant methods or by pepsin digestion of an intact antibody. The F(ab′) fragments can be dissociated, for example, by treatment with β-mercaptoethanol.

[0052] “Single-chain Fv” or “sFv” or “scFv” antibody fragments comprise a V_{H} domain and a V_{L} domain in a single polypeptide chain. The V_{H} and V_{L} are generally linked by a peptide linker. See Plückthun A. (1994). In some embodiments, the linker is a (GGGGS)n (SEQ ID NO: 9224). In some embodiments, n=1, 2, 3, 4, 5, or 6. See Antibodies from Escherichia coli. In Rosenberg M. & Moore G. P. (Eds.), The Pharmacology of Monoclonal Antibodies vol. 113 (pp. 269-315). Springer-Verlag, New York, incorporated by reference in its entirety.

[0053] “scFv-Fc” fragments comprise an scFv attached to an Fc domain. For example, an Fc domain may be attached to the C-terminal of the scFv. The Fc domain may follow the V_{H} or V_{L}, depending on the orientation of the variable domains in the scFv (i.e., V_{H}-V_{L} or V_{L}-V_{H}). Any suitable Fc domain known in the art or described herein may be used. In some cases, the Fc domain comprises an IgG4 Fc domain.

[0054] The term “single domain antibody” refers to a molecule in which one variable domain of an antibody specifically binds to an antigen without the presence of the other variable domain. Single domain antibodies, and fragments thereof, are described in Arabi Ghahroudi et al., FEBS Letters, 1998, 414:521-526 and Muyldermans et al., Trends in Biochem. Sci., 2001, 26:230-245, each of which is incorporated by reference in its entirety.

[0055] A “monospecific ABP” is an ABP that comprises a binding site that specifically binds to a single epitope. An example of a monospecific ABP is a naturally occurring IgG molecule which, while divalent, recognizes the same epitope at each antigen-binding domain. The binding specificity may be present in any suitable valency.

[0056] The term “monoclonal antibody” refers to an antibody from a population of substantially homogeneous antibodies. A population of substantially homogeneous antibodies comprises antibodies that are substantially similar and that bind the same epitope(s), except for variants that may normally arise during production of the monoclonal antibody. Such variants are generally present in only minor amounts. A monoclonal antibody is typically obtained by a process that includes the selection of a single antibody from a plurality of antibodies. For example, the selection process can be the selection of a unique clone from a plurality of clones, such as a pool of hybridoma clones, phage clones, yeast clones, bacterial clones, or other recombinant DNA clones. The selected antibody can be further altered, for example, to improve affinity for the target (“affinity maturation”), to humanize the antibody, to improve its production in cell culture, and/or to reduce its immunogenicity in a subject.

[0057] The term “chimeric antibody” refers to an antibody in which a portion of the heavy and/or light chain is derived from a particular source or species, while the remainder of the heavy and/or light chain is derived from a different source or species.

[0058] “Humanized” forms of non-human antibodies are chimeric antibodies that contain minimal sequence derived from the non-human antibody. A humanized antibody is generally a human antibody (recipient antibody) in which residues from one or more CDRs are replaced by residues from one or more CDRs of a non-human antibody (donor antibody). The donor antibody can be any suitable non-human antibody, such as a mouse, rat, rabbit, chicken, or non-human primate antibody having a desired specificity, affinity, or biological effect. In some instances, selected framework region residues of the recipient antibody are replaced by the corresponding framework region residues from the donor antibody. Humanized antibodies may also comprise residues that are not found in either the recipient antibody or the donor antibody. Such modifications may be made to further refine antibody function. For further details, see Jones et al., Nature, 1986, 321:522-525; Riechmann et al., Nature, 1988, 332:323-329; and Presta, Curr. Op. Struct. Biol., 1992, 2:593-596, each of which is incorporated by reference in its entirety.

[0059] A “human antibody” is one which possesses an amino acid sequence corresponding to that of an antibody produced by a human or a human cell, or derived from a non-human source that utilizes a human antibody repertoire or human antibody-encoding sequences (e.g., obtained from human sources or designed de novo). Human antibodies specifically exclude humanized antibodies. In some embodiments, rodents are genetically engineered to replace their rodent antibody sequences with human antibody sequences.

[0060] An “isolated ABP” or “isolated nucleic acid” is an ABP or nucleic acid that has been separated and/or recovered from a component of its natural environment. Components of the natural environment may include enzymes, hormones, and other proteinaceous or nonproteinaceous materials. In some embodiments, an isolated ABP is purified to a degree sufficient to obtain at least 15 residues of N-terminal or internal amino acid sequence, for example by use of a spinning cup sequenator. In some embodiments, an isolated ABP is purified to homogeneity by gel electrophoresis (e.g., SDS-PAGE) under reducing or nonreducing conditions, with detection by Coomassie blue or silver stain. An isolated ABP includes an ABP in situ within recombinant cells, since at least one component of the ABP's natural environment is not present. In some aspects, an isolated ABP or isolated nucleic acid is prepared by at least one purification step. In some embodiments, an isolated ABP or isolated nucleic acid is purified to at least 80%, 85%, 90%, 95%, or 99% by weight. In some embodiments, an isolated ABP or isolated nucleic acid is purified to at least 80%, 85%, 90%, 95%, or 99% by volume. In some embodiments, an isolated ABP or isolated nucleic acid is provided as a solution comprising at least 85%, 90%, 95%, 98%, 99% to 100% ABP or nucleic acid by weight. In some embodiments, an isolated ABP or isolated nucleic acid is provided as a solution comprising at least 85%, 90%, 95%, 98%, 99% to 100% ABP or nucleic acid by volume.

[0061] “Affinity” refers to the strength of the sum total of non-covalent interactions between a single binding site of a molecule (e.g., an ABP) and its binding partner (e.g., an antigen or epitope). Unless indicated otherwise, as used herein, “affinity” refers to intrinsic binding affinity, which reflects a 1:1 interaction between members of a binding pair (e.g., ABP and antigen or epitope). The affinity of a molecule X for its partner Y can be represented by the dissociation equilibrium constant (K_{D}). The kinetic components that contribute to the dissociation equilibrium constant are described in more detail below. Affinity can be measured by common methods known in the art, including those described herein. Affinity can be determined, for example, using surface plasmon resonance (SPR) technology (e.g., BIACORE®) or biolayer interferometry (e.g., FORTEBIO®.

[0062] With regard to the binding of an ABP to a target molecule, the terms “bind,” “specific binding,” “specifically binds to,” “specific for,” “selectively binds,” and “selective for” a particular antigen (e.g., a polypeptide target) or an epitope on a particular antigen mean binding that is measurably different from a non-specific or non-selective interaction (e.g., with a non-target molecule). Specific binding can be measured, for example, by measuring binding to a target molecule and comparing it to binding to a non-target molecule. Specific binding can also be determined by competition with a control molecule that mimics the epitope recognized on the target molecule. In that case, specific binding is indicated if the binding of the ABP to the target molecule is competitively inhibited by the control molecule. In some aspects, the affinity of a PD-L1 ABP for a non-target molecule is less than about 50% of the affinity for PD-L1. In some aspects, the affinity of a PD-L1 ABP for a non-target molecule is less than about 40% of the affinity for PD-L1. In some aspects, the affinity of a PD-L1 ABP for a non-target molecule is less than about 30% of the affinity for PD-L1. In some aspects, the affinity of a PD-L1 ABP for a non-target molecule is less than about 20% of the affinity for PD-L1. In some aspects, the affinity of a PD-L1 ABP for a non-target molecule is less than about 10% of the affinity for PD-L1. In some aspects, the affinity of a PD-L1 ABP for a non-target molecule is less than about 1% of the affinity for PD-L1. In some aspects, the affinity of a PD-L1 ABP for a non-target molecule is less than about 0.1% of the affinity for PD-L1.

[0063] The term “k_{d}” (sec⁻¹), as used herein, refers to the dissociation rate constant of a particular ABP-antigen interaction. This value is also referred to as the k_{off} value.

[0064] The term “kₐ” (M⁻¹×sec⁻¹), as used herein, refers to the association rate constant of a particular ABP-antigen interaction. This value is also referred to as the kₒₙ value.

[0065] The term “K_{D}” (M), as used herein, refers to the dissociation equilibrium constant of a particular ABP-antigen interaction. K_{D}=k_{d}/kₐ.

[0066] The term “K_{A}” (M⁻¹), as used herein, refers to the association equilibrium constant of a particular ABP-antigen interaction. K_{A}=kₐ/k_{d}.

[0067] An “affinity matured” ABP is one with one or more alterations (e.g., in one or more CDRs or FRs) that result in an improvement in the affinity of the ABP for its antigen, compared to a parent ABP which does not possess the alteration(s). In one embodiment, an affinity matured ABP has nanomolar or picomolar affinity for the target antigen. Affinity matured ABPs may be produced using a variety of methods known in the art. For example, Marks et al. (Bio/Technology, 1992, 10:779-783, incorporated by reference in its entirety) describes affinity maturation by V_{H} and V_{L} domain shuffling. Random mutagenesis of CDR and/or framework residues is described by, for example, Barbas et al. (Proc. Nat. Acad. Sci. U.S.A., 1994, 91:3809-3813); Schier et al., Gene, 1995, 169:147-155; Yelton et al., J. Immunol., 1995, 155:1994-2004; Jackson et al., J. Immunol., 1995, 154:3310-33199; and Hawkins et al, J. Mol. Biol., 1992, 226:889-896; each of which is incorporated by reference in its entirety.

[0068] An “immunoconjugate” is an ABP conjugated to one or more heterologous molecule(s).

[0069] “Effector functions” refer to those biological activities mediated by the Fc region of an antibody, which activities may vary depending on the antibody isotype. Examples of antibody effector functions include C1q binding to activate complement dependent cytotoxicity (CDC), Fc receptor binding to activate antibody-dependent cellular cytotoxicity (ADCC), and antibody dependent cellular phagocytosis (ADCP).

[0070] When used herein in the context of two or more ABPs, the term “competes with” or “cross-competes with” indicates that the two or more ABPs compete for binding to an antigen (e.g., PDL1). In one exemplary assay, PD-L1 is coated on a surface and contacted with a first PD-L1 ABP, after which a second PD-L1 ABP is added. In another exemplary assay, a first PD-L1 ABP is coated on a surface and contacted with PD-L1, and then a second PD-L1 ABP is added. If the presence of the first PD-L1 ABP reduces binding of the second PD-L1 ABP, in either assay, then the ABPs compete. The term “competes with” also includes combinations of ABPs where one ABP reduces binding of another ABP, but where no competition is observed when the ABPs are added in the reverse order. However, in some embodiments, the first and second ABPs inhibit binding of each other, regardless of the order in which they are added. In some embodiments, one ABP reduces binding of another ABP to its antigen by at least 25%, at least 50%, at least 60%, at least 70%, at least 80%, at least 85%, at least 90%, or at least 95%. A skilled artisan can select the concentrations of the antibodies used in the competition assays based on the affinities of the ABPs for PD-L1 and the valency of the ABPs. The assays described in this definition are illustrative, and a skilled artisan can utilize any suitable assay to determine if antibodies compete with each other. Suitable assays are described, for example, in Cox et al., “Immunoassay Methods,” in Assay Guidance Manual [Internet], Updated Dec. 24, 2014 (www.ncbi.nlm.nih.gov/books/NBK92434/; accessed Sep. 29, 2015); Silman et al., Cytometry, 2001, 44:30-37; and Finco et al., J. Pharm. Biomed. Anal., 2011, 54:351-358; each of which is incorporated by reference in its entirety.

[0071] The term “epitope” means a portion of an antigen the specifically binds to an ABP. Epitopes frequently consist of surface-accessible amino acid residues and/or sugar side chains and may have specific three dimensional structural characteristics, as well as specific charge characteristics. Conformational and non-conformational epitopes are distinguished in that the binding to the former but not the latter may be lost in the presence of denaturing solvents. An epitope may comprise amino acid residues that are directly involved in the binding, and other amino acid residues, which are not directly involved in the binding. The epitope to which an ABP binds can be determined using known techniques for epitope determination such as, for example, testing for ABP binding to PD-L1 variants with different point-mutations, or to chimeric PD-L1 variants.

[0072] Percent “identity” between a polypeptide sequence and a reference sequence, is defined as the percentage of amino acid residues in the polypeptide sequence that are identical to the amino acid residues in the reference sequence, after aligning the sequences and introducing gaps, if necessary, to achieve the maximum percent sequence identity. Alignment for purposes of determining percent amino acid sequence identity can be achieved in various ways that are within the skill in the art, for instance, using publicly available computer software such as BLAST, BLAST-2, ALIGN, MEGALIGN (DNASTAR), CLUSTALW, CLUSTAL OMEGA, or MUSCLE software. Those skilled in the art can determine appropriate parameters for aligning sequences, including any algorithms needed to achieve maximal alignment over the full length of the sequences being compared.

[0073] A “conservative substitution” or a “conservative amino acid substitution,” refers to the substitution an amino acid with a chemically or functionally similar amino acid. Conservative substitution tables providing similar amino acids are well known in the art. By way of example, the groups of amino acids provided in TABLES 2-4 are, in some embodiments, considered conservative substitutions for one another.

TABLE 2
Selected groups of amino acids that are considered
conservative substitutions for one another, in certain embodiments.

| | |
|---|---|
| Acidic Residues | D and E |
| Basic Residues | K, R, and H |
| Hydrophilic Uncharged Residues | S, T, N, and Q |
| Aliphatic Uncharged Residues | G, A, V, L, and I |
| Non-polar Uncharged Residues | C, M, and P |
| Aromatic Residues | F, Y, and W |

TABLE 3
Additional selected groups of amino acids that are considered
conservative substitutions for one another, in certain embodiments.

| | |
|---|---|
| Group 1 | A, S, and T |
| Group 2 | D and E |
| Group 3 | N and Q |
| Group 4 | R and K |
| Group 5 | I, L and M |
| Group 6 | F, Y, and W |

TABLE 4
Further selected groups of amino acids that are considered
conservative substitutions for one another, in certain embodiments.

| | |
|---|---|
| Group A | A and G |
| Group B | D and E |
| Group C | N and Q |
| Group D | R, K, and H |
| Group E | I, L, M, V |
| Group F | F, Y, and W |
| Group G | S and T |
| Group H | C and M |

[0074] Additional conservative substitutions may be found, for example, in Creighton, Proteins: Structures and Molecular Properties 2nd ed. (1993) W. H. Freeman & Co., New York, N.Y. An ABP generated by making one or more conservative substitutions of amino acid residues in a parent ABP is referred to as a “conservatively modified variant.”

[0075] The term “treating” (and variations thereof such as “treat” or “treatment”) refers to clinical intervention in an attempt to alter the natural course of a disease or condition in a subject in need thereof. Treatment can be performed both for prophylaxis and during the course of clinical pathology. Desirable effects of treatment include preventing occurrence or recurrence of disease, alleviation of symptoms, diminish of any direct or indirect pathological consequences of the disease, preventing metastasis, decreasing the rate of disease progression, amelioration or palliation of the disease state, and remission or improved prognosis.

[0076] As used herein, the term “therapeutically effective amount” or “effective amount” refers to an amount of an ABP or pharmaceutical composition provided herein that, when administered to a subject, is effective to treat a disease or disorder.

[0077] As used herein, the term “subject” means a mammalian subject. Exemplary subjects include humans, monkeys, dogs, cats, mice, rats, cows, horses, camels, goats, rabbits, and sheep. In certain embodiments, the subject is a human. In some embodiments the subject has a disease or condition that can be treated with an ABP provided herein. In some aspects, the disease or condition is a cancer. In some aspects, the disease or condition is a viral infection.

[0078] The term “package insert” is used to refer to instructions customarily included in commercial packages of therapeutic or diagnostic products (e.g., kits) that contain information about the indications, usage, dosage, administration, combination therapy, contraindications and/or warnings concerning the use of such therapeutic or diagnostic products.

[0079] The term “cytotoxic agent,” as used herein, refers to a substance that inhibits or prevents a cellular function and/or causes cell death or destruction.

[0080] A “chemotherapeutic agent” refers to a chemical compound useful in the treatment of cancer. Chemotherapeutic agents include “anti-hormonal agents” or “endocrine therapeutics” which act to regulate, reduce, block, or inhibit the effects of hormones that can promote the growth of cancer.

[0081] The term “cytostatic agent” refers to a compound or composition which arrests growth of a cell either in vitro or in vivo. In some embodiments, a cytostatic agent is an agent that reduces the percentage of cells in S phase. In some embodiments, a cytostatic agent reduces the percentage of cells in S phase by at least about 20%, at least about 40%, at least about 60%, or at least about 80%.

[0082] The term “tumor” refers to all neoplastic cell growth and proliferation, whether malignant or benign, and all pre-cancerous and cancerous cells and tissues. The terms “cancer,” “cancerous,” “cell proliferative disorder,” “proliferative disorder” and “tumor” are not mutually exclusive as referred to herein. The terms “cell proliferative disorder” and “proliferative disorder” refer to disorders that are associated with some degree of abnormal cell proliferation. In some embodiments, the cell proliferative disorder is a cancer.

[0083] The term “pharmaceutical composition” refers to a preparation which is in such form as to permit the biological activity of an active ingredient contained therein to be effective in treating a subject, and which contains no additional components which are unacceptably toxic to the subject.

[0084] The terms “modulate” and “modulation” refer to reducing or inhibiting or, alternatively, activating or increasing, a recited variable.

[0085] The terms “increase” and “activate” refer to an increase of 10%, 20%, 30%, 40%, 50%, 60%, 70%, 75%, 80%, 85%, 90%, 95%, 100%, 2-fold, 3-fold, 4-fold, 5-fold, 10-fold, 20-fold, 50-fold, 100-fold, or greater in a recited variable.

[0086] The terms “reduce” and “inhibit” refer to a decrease of 10%, 20%, 30%, 40%, 50%, 60%, 70%, 75%, 80%, 85%, 90%, 95%, 2-fold, 3-fold, 4-fold, 5-fold, 10-fold, 20-fold, 50-fold, 100-fold, or greater in a recited variable.

[0087] The term “agonize” refers to the activation of receptor signaling to induce a biological response associated with activation of the receptor. An “agonist” is an entity that binds to and agonizes a receptor.

[0088] The term “antagonize” refers to the inhibition of receptor signaling to inhibit a biological response associated with activation of the receptor. An “antagonist” is an entity that binds to and antagonizes a receptor.

[0089] The term “effector T cell” includes T helper (i.e., CD4+) cells and cytotoxic (i.e., CD8+) T cells. CD4+ effector T cells contribute to the development of several immunologic processes, including maturation of B cells into plasma cells and memory B cells, and activation of cytotoxic T cells and macrophages. CD8+ effector T cells destroy virus-infected cells and tumor cells. See Seder and Ahmed, Nature Immunol., 2003, 4:835-842, incorporated by reference in its entirety, for additional information on effector T cells.

[0090] The term “regulatory T cell” includes cells that regulate immunological tolerance, for example, by suppressing effector T cells. In some aspects, the regulatory T cell has a CD4+CD25+Foxp3+phenotype. In some aspects, the regulatory T cell has a CD8+CD25+phenotype. See Nocentini et al., Br. J. Pharmacol., 2012, 165:2089-2099, incorporated by reference in its entirety, for additional information on regulatory T cells.

[0091] The term “dendritic cell” refers to a professional antigen-presenting cell capable of activating a naïve T cell and stimulating growth and differentiation of a B cell.

[0092] A “variant” of a polypeptide (e.g., an antibody) comprises an amino acid sequence wherein one or more amino acid residues are inserted into, deleted from and/or substituted into the amino acid sequence relative to the native polypeptide sequence, and retains essentially the same biological activity as the native polypeptide. The biological activity of the polypeptide can be measured using standard techniques in the art (for example, if the variant is an antibody, its activity may be tested by binding assays, as described herein). Variants of the present disclosure include fragments, analogs, recombinant polypeptides, synthetic polypeptides, and/or fusion proteins.

[0093] A “derivative” of a polypeptide is a polypeptide (e.g., an antibody) that has been chemically modified, e.g., via conjugation to another chemical moiety such as, for example, polyethylene glycol, albumin (e.g., human serum albumin), phosphorylation, and glycosylation. Unless otherwise indicated, the term “antibody” includes, in addition to antibodies comprising two full-length heavy chains and two full-length light chains, derivatives, variants, fragments, and muteins thereof, examples of which are described below.

[0094] A nucleotide sequence is “operably linked” to a regulatory sequence if the regulatory sequence affects the expression (e.g., the level, timing, or location of expression) of the nucleotide sequence. A “regulatory sequence” is a nucleic acid that affects the expression (e.g., the level, timing, or location of expression) of a nucleic acid to which it is operably linked. The regulatory sequence can, for example, exert its effects directly on the regulated nucleic acid, or through the action of one or more other molecules (e.g., polypeptides that bind to the regulatory sequence and/or the nucleic acid). Examples of regulatory sequences include promoters, enhancers and other expression control elements (e.g., polyadenylation signals). Further examples of regulatory sequences are described in, for example, Goeddel, 1990, Gene Expression Technology: Methods in Enzymology 185, Academic Press, San Diego, Calif. and Baron et al., 1995, Nucleic Acids Res. 23:3605-06.

[0095] A “host cell” is a cell that can be used to express a nucleic acid, e.g., a nucleic acid of the present disclosure. A host cell can be a prokaryote, for example, E. coli, or it can be a eukaryote, for example, a single-celled eukaryote (e.g., a yeast or other fungus), a plant cell (e.g., a tobacco or tomato plant cell), an animal cell (e.g., a human cell, a monkey cell, a hamster cell, a rat cell, a mouse cell, or an insect cell) or a hybridoma. Examples of host cells include CS-9 cells, the COS-7 line of monkey kidney cells (ATCC CRL1651) (see Gluzman et al., 1981, Cell 23:175), L cells, C127 cells, 3T3 cells (ATCC CCL 163), Chinese hamster ovary (CHO) cells or their derivatives such as Veggie CHO and related cell lines which grow in serum-free media (see Rasmussen et al., 1998, Cytotechnology 28:31), HeLa cells, BHK (ATCC CRL10) cell lines, the CV1/EBNA cell line derived from the African green monkey kidney cell line CV1 (ATCC CCL 70) (see McMahan et al., 1991, EMBO J. 10:2821), human embryonic kidney cells such as 293, 293 EBNA or MSR 293, human epidermal A431 cells, human Colo205 cells, other transformed primate cell lines, normal diploid cells, cell strains derived from in vitro culture of primary tissue, primary explants, HL-60, U937, HaK or Jurkat cells. Typically, a host cell is a cultured cell that can be transformed or transfected with a polypeptide-encoding nucleic acid, which can then be expressed in the host cell.

[0096] The phrase “recombinant host cell” can be used to denote a host cell that has been transformed or transfected with a nucleic acid to be expressed. A host cell also can be a cell that comprises the nucleic acid but does not express it at a desired level unless a regulatory sequence is introduced into the host cell such that it becomes operably linked with the nucleic acid. It is understood that the term host cell refers not only to the particular subject cell but to the progeny or potential progeny of such a cell. Because certain modifications may occur in succeeding generations due to, e.g., mutation or environmental influence, such progeny may not, in fact, be identical to the parent cell, but are still included within the scope of the term as used herein.

[0097] 7.2. Other Interpretational Conventions

[0098] Ranges recited herein are understood to be shorthand for all of the values within the range, inclusive of the recited endpoints. For example, a range of 1 to 50 is understood to include any number, combination of numbers, or sub-range from the group consisting of 1, 2, 3, 4, 5, 6, 7, 8, 9, 10, 11, 12, 13, 14, 15, 16, 17, 18, 19, 20, 21, 22, 23, 24, 25, 26, 27, 28, 29, 30, 31, 32, 33, 34, 35, 36, 37, 38, 39, 40, 41, 42, 43, 44, 45, 46, 47, 48, 49, and 50.

[0099] Unless otherwise indicated, reference to a compound that has one or more stereocenters intends each stereoisomer, and all combinations of stereoisomers, thereof

[0100] 7.3. Nucleic Acids

[0101] In one aspect, the present disclosure provides isolated nucleic acid molecules. The nucleic acids comprise, for example, polynucleotides that encode all or part of an antigen binding protein, for example, one or both chains of an antibody of the present disclosure, or a fragment, derivative, mutein, or variant thereof, polynucleotides sufficient for use as hybridization probes, PCR primers or sequencing primers for identifying, analyzing, mutating or amplifying a polynucleotide encoding a polypeptide, anti-sense nucleic acids for inhibiting expression of a polynucleotide, and complementary sequences of the foregoing. The nucleic acids can be any length. They can be, for example, 5, 10, 15, 20, 25, 30, 35, 40, 45, 50, 75, 100, 125, 150, 175, 200, 250, 300, 350, 400, 450, 500, 750, 1,000, 1,500, 3,000, 5,000 or more nucleotides in length, and/or can comprise one or more additional sequences, for example, regulatory sequences, and/or be part of a larger nucleic acid, for example, a vector. The nucleic acids can be single-stranded or double-stranded and can comprise RNA and/or DNA nucleotides, and artificial variants thereof (e.g., peptide nucleic acids).

[0102] Nucleic acids encoding antibody polypeptides (e.g., heavy or light chain, variable domain only, or full length) can be isolated from B-cells of mice that have been immunized with PD-L1. The nucleic acid can be isolated by conventional procedures such as polymerase chain reaction (PCR).

[0103] Nucleic acid sequences encoding the variable regions of the heavy and light chain variable regions are shown herein. The skilled artisan will appreciate that, due to the degeneracy of the genetic code, each of the polypeptide sequences disclosed herein is encoded by a large number of other nucleic acid sequences. The present disclosure provides each degenerate nucleotide sequence encoding each antigen binding protein of the present disclosure.

[0104] The present disclosure further provides nucleic acids that hybridize to other nucleic acids (e.g., nucleic acids comprising a nucleotide sequence of any of PD-L1 gene) under particular hybridization conditions. Methods for hybridizing nucleic acids are well-known in the art. See, e.g., Curr. Prot. in Mol. Biol., John Wiley & Sons, N.Y. (1989), 6.3.1-6.3.6. As defined herein, a moderately stringent hybridization condition uses a prewashing solution containing 5× sodium chloride/sodium citrate (SSC), 0.5% SDS, 1.0 mM EDTA (pH 8.0), hybridization buffer of about 50% formamide, 6×SSC, and a hybridization temperature of 55° C. (or other similar hybridization solutions, such as one containing about 50% formamide, with a hybridization temperature of 42° C.), and washing conditions of 60° C., in 0.5×SSC, 0.1% SDS. A stringent hybridization condition hybridizes in 6×SSC at 45° C., followed by one or more washes in 0.1×SSC, 0.2% SDS at 68° C. Furthermore, one of skill in the art can manipulate the hybridization and/or washing conditions to increase or decrease the stringency of hybridization such that nucleic acids comprising nucleotide sequences that are at least 65, 70, 75, 80, 85, 90, 95, 98, or 99% identical to each other typically remain hybridized to each other. The basic parameters affecting the choice of hybridization conditions and guidance for devising suitable conditions are set forth by, for example, Sambrook, Fritsch, and Maniatis (1989, Molecular Cloning: A Laboratory Manual, Cold Spring Harbor Laboratory Press, Cold Spring Harbor, N.Y., chapters 9 and 11; and Curr. Prot. in Mol. Biol. 1995, Ausubel et al., eds., John Wiley & Sons, Inc., sections 2.10 and 6.3-6.4), and can be readily determined by those having ordinary skill in the art based on, for example, the length and/or base composition of the DNA.

[0105] Changes can be introduced by mutation into a nucleic acid, thereby leading to changes in the amino acid sequence of a polypeptide (e.g., an antigen binding protein) that it encodes. Mutations can be introduced using any technique known in the art. In one embodiment, one or more particular amino acid residues are changed using, for example, a site-directed mutagenesis protocol. In another embodiment, one or more randomly selected residues are changed using, for example, a random mutagenesis protocol. However it is made, a mutant polypeptide can be expressed and screened for a desired property (e.g., binding to PD-L1).

[0106] Mutations can be introduced into a nucleic acid without significantly altering the biological activity of a polypeptide that it encodes. For example, one can make nucleotide substitutions leading to amino acid substitutions at non-essential amino acid residues. In one embodiment, a nucleotide sequence provided herein for PD-L1, or a desired fragment, variant, or derivative thereof, is mutated such that it encodes an amino acid sequence comprising one or more deletions or substitutions of amino acid residues that are shown herein for PD-L1 to be residues where two or more sequences differ. Alternatively, one or more mutations can be introduced into a nucleic acid that selectively change the biological activity (e.g., binding of PD-L1) of a polypeptide that it encodes. For example, the mutation can quantitatively or qualitatively change the biological activity. Examples of quantitative changes include increasing, reducing or eliminating the activity. Examples of qualitative changes include changing the antigen specificity of an antigen binding protein.

[0107] In another aspect, the present disclosure provides nucleic acid molecules that are suitable for use as primers or hybridization probes for the detection of nucleic acid sequences of the present disclosure. A nucleic acid molecule of the present disclosure can comprise only a portion of a nucleic acid sequence encoding a full-length polypeptide of the present disclosure, for example, a fragment that can be used as a probe or primer or a fragment encoding an active portion (e.g., a PD-L1 binding portion) of a polypeptide of the present disclosure.

[0108] Probes based on the sequence of a nucleic acid of the present disclosure can be used to detect the nucleic acid or similar nucleic acids, for example, transcripts encoding a polypeptide of the present disclosure. The probe can comprise a label group, e.g., a radioisotope, a fluorescent compound, an enzyme, or an enzyme co-factor. Such probes can be used to identify a cell that expresses the polypeptide

[0109] 7.4. Expression Vectors

[0110] The present disclosure provides vectors comprising a nucleic acid encoding a polypeptide of the present disclosure or a portion thereof. Examples of vectors include, but are not limited to, plasmids, viral vectors, non-episomal mammalian vectors and expression vectors, for example, recombinant expression vectors.

[0111] In another aspect of the present disclosure, expression vectors containing the nucleic acid molecules and polynucleotides of the present disclosure are also provided, and host cells transformed with such vectors, and methods of producing the polypeptides are also provided. The term “expression vector” refers to a plasmid, phage, virus or vector for expressing a polypeptide from a polynucleotide sequence. Vectors for the expression of the polypeptides contain at a minimum sequences required for vector propagation and for expression of the cloned insert. An expression vector comprises a transcriptional unit comprising an assembly of (1) a genetic element or elements having a regulatory role in gene expression, for example, promoters or enhancers, (2) a sequence that encodes polypeptides and proteins to be transcribed into mRNA and translated into protein, and (3) appropriate transcription initiation and termination sequences. These sequences may further include a selection marker. Vectors suitable for expression in host cells are readily available and the nucleic acid molecules are inserted into the vectors using standard recombinant DNA techniques. Such vectors can include promoters which function in specific tissues, and viral vectors for the expression of polypeptides in targeted human or animal cells.

[0112] The recombinant expression vectors of the present disclosure can comprise a nucleic acid of the present disclosure in a form suitable for expression of the nucleic acid in a host cell. The recombinant expression vectors include one or more regulatory sequences, selected on the basis of the host cells to be used for expression, which is operably linked to the nucleic acid sequence to be expressed. Regulatory sequences include those that direct constitutive expression of a nucleotide sequence in many types of host cells (e.g., SV40 early gene enhancer, Rous sarcoma virus promoter and cytomegalovirus promoter), those that direct expression of the nucleotide sequence only in certain host cells (e.g., tissue-specific regulatory sequences, see Voss et al., 1986, Trends Biochem. Sci. 11:287, Maniatis et al., 1987, Science 236:1237, incorporated by reference herein in their entireties), and those that direct inducible expression of a nucleotide sequence in response to particular treatment or condition (e.g., the metallothionin promoter in mammalian cells and the tet-responsive and/or streptomycin responsive promoter in both prokaryotic and eukaryotic systems (see id.). It will be appreciated by those skilled in the art that the design of the expression vector can depend on such factors as the choice of the host cell to be transformed, the level of expression of protein desired, etc. The expression vectors of the present disclosure can be introduced into host cells to thereby produce proteins or peptides, including fusion proteins or peptides, encoded by nucleic acids as described herein.

[0113] In some embodiments, the expression vector is an expression vector purified from one of the clones of the library of PD-L1 binding clones deposited under ATCC Accession No. PTA-125513. In some embodiments, the expression vector is generated by genetic modification of one of an expression vector in one of the clones purified from the library of PD-L1 binding clones deposited under ATCC Accession No. PTA-125513. In some embodiments, the expression vector is generated by using variable region sequences of heavy and light chains of one of the clones of the library of PD-L1 binding clones deposited under ATCC Accession No. PTA-125513.

[0114] The present disclosure further provides methods of making polypeptides. A variety of other expression/host systems may be utilized. Vector DNA can be introduced into prokaryotic or eukaryotic systems via conventional transformation or transfection techniques. These systems include but are not limited to microorganisms such as bacteria (for example, E. coli) transformed with recombinant bacteriophage, plasmid or cosmid DNA expression vectors; yeast transformed with yeast expression vectors; insect cell systems infected with virus expression vectors (e.g., baculovirus); plant cell systems transfected with virus expression vectors (e.g., cauliflower mosaic virus, CaMV; tobacco mosaic virus, TMV) or transformed with bacterial expression vectors (e.g., Ti or pBR322 plasmid); or animal cell systems. Mammalian cells useful in recombinant protein production include but are not limited to VERO cells, HeLa cells, Chinese hamster ovary (CHO) cell lines, or their derivatives such as Veggie CHO and related cell lines which grow in serum-free media (see Rasmussen et al., 1998, Cytotechnology 28:31) or CHO strain DX-B11, which is deficient in DHFR (see Urlaub et al., 1980, Proc. Natl. Acad. Sci. USA 77:4216-20) COS cells such as the COS-7 line of monkey kidney cells (ATCC CRL1651) (see Gluzman et al., 1981, Cell 23:175), W138, BHK, HepG2, 3T3 (ATCC CCL 163), RIN, MDCK, A549, PC12, K562, L cells, C127 cells, BHK (ATCC CRL10) cell lines, the CV1/EBNA cell line derived from the African green monkey kidney cell line CV1 (ATCC CCL 70) (see McMahan et al., 1991, EMBO J. 10:2821), human embryonic kidney cells such as 293, 293 EBNA or MSR 293, human epidermal A431 cells, human Colo205 cells, other transformed primate cell lines, normal diploid cells, cell strains derived from in vitro culture of primary tissue, primary explants, HL-60, U937, HaK or Jurkat cells. Mammalian expression allows for the production of secreted or soluble polypeptides which may be recovered from the growth medium.

[0115] For stable transfection of mammalian cells, it is known that, depending upon the expression vector and transfection technique used, only a small fraction of cells may integrate the foreign DNA into their genome. In order to identify and select these integrants, a gene that encodes a selectable marker (e.g., for resistance to antibiotics) is generally introduced into the host cells along with the gene of interest. Once such cells are transformed with vectors that contain selectable markers as well as the desired expression cassette, the cells can be allowed to grow in an enriched media before they are switched to selective media, for example. The selectable marker is designed to allow growth and recovery of cells that successfully express the introduced sequences. Resistant clumps of stably transformed cells can be proliferated using tissue culture techniques appropriate to the cell line employed. An overview of expression of recombinant proteins is found in Methods of Enzymology, v. 185, Goeddell, D. V., ed., Academic Press (1990). Preferred selectable markers include those which confer resistance to drugs, such as G418, hygromycin and methotrexate. Cells stably transfected with the introduced nucleic acid can be identified by drug selection (e.g., cells that have incorporated the selectable marker gene will survive, while the other cells die), among other methods.

[0116] The transformed cells can be cultured under conditions that promote expression of the polypeptide, and the polypeptide recovered by conventional protein purification procedures (as defined above). One such purification procedure includes the use of affinity chromatography, e.g., over a matrix having all or a portion (e.g., the extracellular domain) of PD-L1 bound thereto. Polypeptides contemplated for use herein include substantially homogeneous recombinant mammalian anti-PD-L1 antibody polypeptides substantially free of contaminating endogenous materials.

[0117] In some cases, such as in expression using prokaryotic systems, the expressed polypeptides of this disclosure may need to be “refolded” and oxidized into a proper tertiary structure and disulfide linkages generated in order to be biologically active. Refolding can be accomplished using a number of procedures well known in the art. Such methods include, for example, exposing the solubilized polypeptide to a pH usually above 7 in the presence of a chaotropic agent. The selection of chaotrope is similar to the choices used for inclusion body solubilization; however a chaotrope is typically used at a lower concentration. Exemplary chaotropic agents are guanidine and urea. In most cases, the refolding/oxidation solution will also contain a reducing agent plus its oxidized form in a specific ratio to generate a particular redox potential which allows for disulfide shuffling to occur for the formation of cysteine bridges. Some commonly used redox couples include cysteine/cystamine, glutathione/dithiobisGSH, cupric chloride, dithiothreitol DTT/dithiane DTT, and 2-mercaptoethanol (bME)/dithio-bME. In many instances, a co-solvent may be used to increase the efficiency of the refolding. Commonly used cosolvents include glycerol, polyethylene glycol of various molecular weights, and arginine.

[0118] In addition, the polypeptides can be synthesized in solution or on a solid support in accordance with conventional techniques. Various automatic synthesizers are commercially available and can be used in accordance with known protocols. See, for example, Stewart and Young, Solid Phase Peptide Synthesis, 2d.Ed., Pierce Chemical Co. (1984); Tam et al., J Am Chem Soc, 105:6442, (1983); Merrifield, Science 232:341-347 (1986); Barany and Merrifield, The Peptides, Gross and Meienhofer, eds, Academic Press, New York, 1-284; Barany et al., Int J Pep Protein Res, 30:705-739 (1987).

[0119] The polypeptides and proteins of the present disclosure can be purified according to protein purification techniques well known to those of skill in the art. These techniques involve, at one level, the crude fractionation of the proteinaceous and non-proteinaceous fractions. Having separated the peptide polypeptides from other proteins, the peptide or polypeptide of interest can be further purified using chromatographic and electrophoretic techniques to achieve partial or complete purification (or purification to homogeneity). The term “purified polypeptide” as used herein, is intended to refer to a composition, isolatable from other components, wherein the polypeptide is purified to any degree relative to its naturally-obtainable state. A purified polypeptide therefore also refers to a polypeptide that is free from the environment in which it may naturally occur. Generally, “purified” will refer to a polypeptide composition that has been subjected to fractionation to remove various other components, and which composition substantially retains its expressed biological activity. Where the term “substantially purified” is used, this designation will refer to a peptide or polypeptide composition in which the polypeptide or peptide forms the major component of the composition, such as constituting about 50%, about 60%, about 70%, about 80%, about 85%, or about 90% or more of the proteins in the composition.

[0120] Various techniques suitable for use in purification will be well known to those of skill in the art. These include, for example, precipitation with ammonium sulphate, PEG, antibodies (immunoprecipitation) and the like or by heat denaturation, followed by centrifugation; chromatography such as affinity chromatography (Protein-A columns), ion exchange, gel filtration, reverse phase, hydroxylapatite, hydrophobic interaction chromatography, isoelectric focusing, gel electrophoresis, and combinations of these techniques. As is generally known in the art, it is believed that the order of conducting the various purification steps may be changed, or that certain steps may be omitted, and still result in a suitable method for the preparation of a substantially purified polypeptide. Exemplary purification steps are provided in the Examples below.

[0121] Various methods for quantifying the degree of purification of polypeptide will be known to those of skill in the art in light of the present disclosure. These include, for example, determining the specific binding activity of an active fraction, or assessing the amount of peptide or polypeptide within a fraction by SDS/PAGE analysis. A preferred method for assessing the purity of a polypeptide fraction is to calculate the binding activity of the fraction, to compare it to the binding activity of the initial extract, and to thus calculate the degree of purification, herein assessed by a “-fold purification number.” The actual units used to represent the amount of binding activity will, of course, be dependent upon the particular assay technique chosen to follow the purification and whether or not the polypeptide or peptide exhibits a detectable binding activity.

[0122] 7.5. Antibody

[0123] PD-L1 antibodies can be purified from host cells that have been transfected by a gene encoding the antibodies by elution of filtered supernatant of host cell culture fluid using a Heparin HP column, using a salt gradient.

[0124] A Fab fragment is a monovalent fragment having the V_{L}, V_{H}, C_{L} and C_{H1} domains; a F(ab′)₂ fragment is a bivalent fragment having two Fab fragments linked by a disulfide bridge at the hinge region; a Fd fragment has the V_{H} and C_{H1} domains; an Fv fragment has the V_{L} and V_{H} domains of a single arm of an antibody; and a dAb fragment has a V_{H} domain, a V_{L} domain, or an antigen-binding fragment of a V_{H} or V_{L} domain (U.S. Pat. Nos. 6,846,634, 6,696,245, US App. Pub. No. 05/0202512, 04/0202995, 04/0038291, 04/0009507, 03/0039958, Ward et al., Nature 341:544-546, 1989).

[0125] Polynucleotide and polypeptide sequences of particular light and heavy chain variable domains are described below. Antibodies comprising a light chain and heavy chain are designated by combining the name of the light chain and the name of the heavy chain variable domains. For example, “L4H7,” indicates an antibody comprising the light chain variable domain of L4 (comprising a sequence of SEQ ID NO:4) and the heavy chain variable domain of H7 (comprising a sequence of SEQ ID NO:507). Light chain variable sequences are provided in SEQ ID Nos: 1-25, and heavy chain variable sequences are provided in SEQ ID Nos:101-124.

[0126] In other embodiments, an antibody may comprise a specific heavy or light chain, while the complementary light or heavy chain variable domain remains unspecified. In particular, certain embodiments herein include antibodies that bind a specific antigen (such as PD-L1) by way of a specific light or heavy chain, such that the complementary heavy or light chain may be promiscuous, or even irrelevant, but may be determined by, for example, screening combinatorial libraries. Portolano et al., J. Immunol. V. 150 (3), pp. 880-887 (1993); Clackson et al., Nature v. 352 pp. 624-628 (1991); Adler et al., A natively paired antibody library yields drug leads with higher sensitivity and specificity than a randomly paired antibody library, MAbs (2018)); Adler et al., Rare, high-affinity mouse anti-PD-L1 antibodies that function in checkpoint blockade, discovered using microfluidics and molecular genomics, MAbs (2017).

[0127] Naturally occurring immunoglobulin chains exhibit the same general structure of relatively conserved framework regions (FR) joined by three hypervariable regions, also called complementarity determining regions or CDRs. From N-terminus to C-terminus, both light and heavy chains comprise the domains FR1, CDR1, FR2, CDR2, FR3, CDR3 and FR4. The assignment of amino acids to each domain is in accordance with the definitions of Kabat et al. in Sequences of Proteins of Immunological Interest, 5th Ed., US Dept. of Health and Human Services, PHS, NIH, NIH Publication no. 91-3242, 1991.

[0128] The term “human antibody,” also referred to as “fully human antibody,” includes all antibodies that have one or more variable and constant regions derived from human immunoglobulin sequences. In one embodiment, all of the variable and constant domains are derived from human immunoglobulin sequences (a fully human antibody). These antibodies may be prepared in a variety of ways, examples of which are described below, including through the immunization with an antigen of interest of a mouse that is genetically modified to express antibodies derived from human heavy and/or light chain-encoding genes.

[0129] A humanized antibody has a sequence that differs from the sequence of an antibody derived from a non-human species by one or more amino acid substitutions, deletions, and/or additions, such that the humanized antibody is less likely to induce an immune response, and/or induces a less severe immune response, as compared to the non-human species antibody, when it is administered to a human subject. In one embodiment, certain amino acids in the framework and constant domains of the heavy and/or light chains of the non-human species antibody are mutated to produce the humanized antibody. In another embodiment, the constant domain(s) from a human antibody are fused to the variable domain(s) of a non-human species. In another embodiment, one or more amino acid residues in one or more CDR sequences of a non-human antibody are changed to reduce the likely immunogenicity of the non-human antibody when it is administered to a human subject, wherein the changed amino acid residues either are not critical for immunospecific binding of the antibody to its antigen, or the changes to the amino acid sequence that are made are conservative changes, such that the binding of the humanized antibody to the antigen is not significantly worse than the binding of the non-human antibody to the antigen. Examples of how to make humanized antibodies may be found in U.S. Pat. Nos. 6,054,297, 5,886,152 and 5,877,293.

[0130] The term “chimeric antibody” refers to an antibody that contains one or more regions from one antibody and one or more regions from one or more other antibodies. In one embodiment, one or more of the CDRs are derived from a human anti-PD-L1 antibody. In another embodiment, all of the CDRs are derived from a human anti-PD-L1 antibody. In another embodiment, the CDRs from more than one human anti-PD-L1 antibodies are mixed and matched in a chimeric antibody. For instance, a chimeric antibody may comprise a CDR1 from the light chain of a first human anti-PD-L1 antibody, a CDR2 and a CDR3 from the light chain of a second human anti-PD-L1 antibody, and the CDRs from the heavy chain from a third anti-PD-L1 antibody. Further, the framework regions may be derived from one of the same anti-PD-L1 antibodies, from one or more different antibodies, such as a human antibody, or from a humanized antibody. In one example of a chimeric antibody, a portion of the heavy and/or light chain is identical with, homologous to, or derived from an antibody from a particular species or belonging to a particular antibody class or subclass, while the remainder of the chain(s) is/are identical with, homologous to, or derived from an antibody (-ies) from another species or belonging to another antibody class or subclass. Also included are fragments of such antibodies that exhibit the desired biological activity (i.e., the ability to specifically bind PD-L1).

[0131] Fragments or analogs of antibodies can be readily prepared by those of ordinary skill in the art following the teachings of this specification and using techniques well-known in the art. Preferred amino- and carboxy-termini of fragments or analogs occur near boundaries of functional domains. Structural and functional domains can be identified by comparison of the nucleotide and/or amino acid sequence data to public or proprietary sequence databases. Computerized comparison methods can be used to identify sequence motifs or predicted protein conformation domains that occur in other proteins of known structure and/or function. Methods to identify protein sequences that fold into a known three-dimensional structure are known. See, e.g., Bowie et al., 1991, Science 253:164.

[0132] Antigen binding fragments derived from an antibody can be obtained, for example, by proteolytic hydrolysis of the antibody, for example, pepsin or papain digestion of whole antibodies according to conventional methods. By way of example, antibody fragments can be produced by enzymatic cleavage of antibodies with pepsin to provide a 5S fragment termed F(ab′)2. This fragment can be further cleaved using a thiol reducing agent to produce 3.5S Fab′ monovalent fragments. Optionally, the cleavage reaction can be performed using a blocking group for the sulfhydryl groups that result from cleavage of disulfide linkages. As an alternative, an enzymatic cleavage using papain produces two monovalent Fab fragments and an Fc fragment directly. These methods are described, for example, by Goldenberg, U.S. Pat. No. 4,331,647, Nisonoff et al., Arch. Biochem. Biophys. 89:230, 1960; Porter, Biochem. J. 73:119, 1959; Edelman et al., in Methods in Enzymology 1:422 (Academic Press 1967); and by Andrews, S. M. and Titus, J. A. in Current Protocols in Immunology (Coligan J. E., et al., eds), John Wiley & Sons, New York (2003), pages 2.8.1 2.8.10 and 2.10A.1 2.10A.5. Other methods for cleaving antibodies, such as separating heavy chains to form monovalent light heavy chain fragments (Fd), further cleaving of fragments, or other enzymatic, chemical, or genetic techniques may also be used, so long as the fragments bind to the antigen that is recognized by the intact antibody.

[0133] An antibody fragment may also be any synthetic or genetically engineered protein. For example, antibody fragments include isolated fragments consisting of the light chain variable region, “Fv” fragments consisting of the variable regions of the heavy and light chains, recombinant single chain polypeptide molecules in which light and heavy variable regions are connected by a peptide linker (scFv proteins).

[0134] Another form of an antibody fragment is a peptide comprising one or more complementarity determining regions (CDRs) of an antibody. CDRs (also termed “minimal recognition units”, or “hypervariable region”) can be incorporated into a molecule either covalently or noncovalently to make it an antigen binding protein. CDRs can be obtained by constructing polynucleotides that encode the CDR of interest. Such polynucleotides are prepared, for example, by using the polymerase chain reaction to synthesize the variable region using mRNA of antibody producing cells as a template (see, for example, Larrick et al., Methods: A Companion to Methods in Enzymology 2:106, 1991; Courtenay Luck, “Genetic Manipulation of Monoclonal Antibodies,” in Monoclonal Antibodies: Production, Engineering and Clinical Application, Ritter et al. (eds.), page 166 (Cambridge University Press 1995); and Ward et al., “Genetic Manipulation and Expression of Antibodies,” in Monoclonal Antibodies: Principles and Applications, Birch et al., (eds.), page 137 (Wiley Liss, Inc. 1995).

[0135] Thus, in one embodiment, the binding agent comprises at least one CDR as described herein. The binding agent may comprise at least two, three, four, five or six CDR's as described herein. The binding agent may further comprise at least one variable region domain of an antibody described herein. The variable region domain may be of any size or amino acid composition and will generally comprise at least one CDR sequence responsible for binding to human PD-L1, for example CDR1-H, CDR2-H, CDR3-H, CDR1-L, CDR2-L, and CDR3-L, specifically described herein and which is adjacent to or in frame with one or more framework sequences. In general terms, the variable (V) region domain may be any suitable arrangement of immunoglobulin heavy (V_{H}) and/or light (V_{L}) chain variable domains. Thus, for example, the V region domain may be monomeric and be a V_{H} or V_{L} domain, which is capable of independently binding human PD-L1 with an affinity at least equal to 1×10⁷M or less as described below. Alternatively, the V region domain may be dimeric and contain V_{H} V_{H}, V_{H} V_{L}, or V_{L} V_{L}, dimers. The V region dimer comprises at least one V_{H} and at least one V_{L} chain that may be non-covalently associated (hereinafter referred to as Fv). If desired, the chains may be covalently coupled either directly, for example via a disulfide bond between the two variable domains, or through a linker, for example a peptide linker, to form a single chain Fv (scFV).

[0136] The variable region domain may be any naturally occurring variable domain or an engineered version thereof. By engineered version is meant a variable region domain that has been created using recombinant DNA engineering techniques. Such engineered versions include those created, for example, from a specific antibody variable region by insertions, deletions, or changes in or to the amino acid sequences of the specific antibody. Particular examples include engineered variable region domains containing at least one CDR and optionally one or more framework amino acids from a first antibody and the remainder of the variable region domain from a second antibody.

[0137] The variable region domain may be covalently attached at a C terminal amino acid to at least one other antibody domain or a fragment thereof. Thus, for example, a V_{H} domain that is present in the variable region domain may be linked to an immunoglobulin CH1 domain, or a fragment thereof. Similarly a V_{L} domain may be linked to a CK domain or a fragment thereof. In this way, for example, the antibody may be a Fab fragment wherein the antigen binding domain contains associated V_{H} and V_{L} domains covalently linked at their C termini to a CH1 and CK domain, respectively. The CH1 domain may be extended with further amino acids, for example to provide a hinge region or a portion of a hinge region domain as found in a Fab′ fragment, or to provide further domains, such as antibody CH2 and CH3 domains.

[0138] As described herein, antibodies comprise at least one of these CDRs. For example, one or more CDR may be incorporated into known antibody framework regions (IgG1, IgG2, etc.), or conjugated to a suitable vehicle to enhance the half-life thereof. Suitable vehicles include, but are not limited to Fc, polyethylene glycol (PEG), albumin, transferrin, and the like. These and other suitable vehicles are known in the art. Such conjugated CDR peptides may be in monomeric, dimeric, tetrameric, or other form. In one embodiment, one or more water-soluble polymer is bonded at one or more specific position, for example at the amino terminus, of a binding agent.

[0139] In another example, individual V_{L} or V_{H} chains from an antibody (i.e. PD-1,1 antibody) can be used to search for other V_{H} or V_{L} chains that could form antigen-binding fragments (or Fab), with the same specificity. Thus, random combinations of V_{H} and V_{L} chain Ig genes can be expressed as antigen-binding fragments in a bacteriophage library (such as fd or lambda phage). For instance, a combinatorial library may be generated by utilizing the parent V_{L} or V_{H} chain library combined with antigen-binding specific V_{L} or V_{H} chain libraries, respectively. The combinatorial libraries may then be screened by conventional techniques, for example by using radioactively labeled probe (such as radioactively labeled PD-L1). See, for example, Portolano et al., J. Immunol. V. 150 (3) pp. 880-887 (1993).

[0140] Diabodies are bivalent antibodies comprising two polypeptide chains, wherein each polypeptide chain comprises V_{H} and V_{L} domains joined by a linker that is too short to allow for pairing between two domains on the same chain, thus allowing each domain to pair with a complementary domain on another polypeptide chain (see, e.g., Holliger et al., 1993, Proc. Natl. Acad. Sci. USA 90:6444-48, and Poljak et al., 1994, Structure 2:1121-23). If the two polypeptide chains of a diabody are identical, then a diabody resulting from their pairing will have two identical antigen binding sites. Polypeptide chains having different sequences can be used to make a diabody with two different antigen binding sites. Similarly, tribodies and tetrabodies are antibodies comprising three and four polypeptide chains, respectively, and forming three and four antigen binding sites, respectively, which can be the same or different.

[0141] Antibody polypeptides are also disclosed in U.S. Pat. No. 6,703,199, including fibronectin polypeptide monobodies. Other antibody polypeptides are disclosed in U.S. Patent Publication 2005/0238646, which are single-chain polypeptides.

[0142] In certain embodiments, an antibody comprises one or more water soluble polymer attachments, including, but not limited to, polyethylene glycol, polyoxyethylene glycol, or polypropylene glycol. See, e.g., U.S. Pat. Nos. 4,640,835, 4,496,689, 4,301,144, 4,670,417, 4,791,192 and 4,179,337. In certain embodiments, a derivative binding agent comprises one or more of monomethoxy-polyethylene glycol, dextran, cellulose, or other carbohydrate based polymers, poly-(N-vinyl pyrrolidone)-polyethylene glycol, propylene glycol homopolymers, a polypropylene oxide/ethylene oxide co-polymer, polyoxyethylated polyols (e.g., glycerol) and polyvinyl alcohol, as well as mixtures of such polymers. In certain embodiments, one or more water-soluble polymer is randomly attached to one or more side chains. In certain embodiments, PEG can act to improve the therapeutic capacity for a binding agent, such as an antibody. Certain such methods are discussed, for example, in U.S. Pat. No. 6,133,426, which is hereby incorporated by reference for any purpose.

[0143] 7.6. Antigen Binding Protein

[0144] In one aspect, the present disclosure provides antigen binding proteins (e.g., antibodies, antibody fragments, antibody derivatives, antibody muteins, and antibody variants), that bind to PD-L1.

[0145] An antigen binding protein can have, for example, the structure of a naturally occurring immunoglobulin. An “immunoglobulin” is a tetrameric molecule. In a naturally occurring immunoglobulin, each tetramer is composed of two identical pairs of polypeptide chains, each pair having one “light” (about 25 kDa) and one “heavy” chain (about 50-70 kDa). The amino-terminal portion of each chain includes a variable region of about 100 to 110 or more amino acids primarily responsible for antigen recognition. The carboxy-terminal portion of each chain defines a constant region primarily responsible for effector function. Human light chains are classified as kappa and lambda light chains. Heavy chains are classified as mu, delta, gamma, alpha, or epsilon, and define the antibody's isotype as IgM, IgD, IgG, IgA, and IgE, respectively. Within light and heavy chains, the variable and constant regions are joined by a “J” region of about 12 or more amino acids, with the heavy chain also including a “D” region of about 10 more amino acids. See generally, Fundamental Immunology Ch. 7 (Paul, W., ed., 2nd ed. Raven Press, N.Y. (1989)) (incorporated by reference in its entirety for all purposes). The variable regions of each light/heavy chain pair form the antibody binding site such that an intact immunoglobulin has two binding sites.

[0146] Antigen binding proteins in accordance with the present disclosure include antigen binding proteins that inhibit a biological activity of PD-L1.

[0147] Different antigen binding proteins may bind to different domains of PD-L1 or act by different mechanisms of action. As indicated herein inter alia, the domain region are designated such as to be inclusive of the group, unless otherwise indicated. For example, amino acids 4-12 refers to nine amino acids: amino acids at positions 4, and 12, as well as the seven intervening amino acids in the sequence. Other examples include antigen binding proteins that inhibit binding of PD-L1 to its ligands. An antigen binding protein need not completely inhibit a PD-L1-induced activity to find use in the present disclosure; rather, antigen binding proteins that reduce a particular activity of PD-L1 are contemplated for use as well. (Discussions herein of particular mechanisms of action for PD-L1-binding antigen binding proteins in treating particular diseases are illustrative only, and the methods presented herein are not bound thereby.)

[0148] In another aspect, the present disclosure provides antigen binding proteins that comprise a light chain variable region selected from the group consisting of A1LC-A24LC or a heavy chain variable region selected from the group consisting of A1HC-A24HC, and fragments, derivatives, muteins, and variants thereof. Such an antigen binding protein can be denoted using the nomenclature “LxHy,” wherein “x” corresponds to the number of the light chain variable region and “y” corresponds to the number of the heavy chain variable region as they are labeled in the sequences below. That is to say, for example, that “A1HC” denotes the heavy chain variable region comprising the amino acid sequence of SEQ ID NO: 101; “A1LC” denotes the light chain variable region comprising the amino acid sequence of SEQ ID NO:1, and so forth. More generally speaking, “L2H1” refers to an antigen binding protein with a light chain variable region comprising the amino acid sequence of L2 (SEQ ID NO:2) and a heavy chain variable region comprising the amino acid sequence of H1 (SEQ ID NO:101). For clarity, all ranges denoted by at least two members of a group include all members of the group between and including the end range members. Thus, the group range A1-A25, includes all members between A1 and A25, as well as members A1 and A25 themselves. The group range A4-A6 includes members A4, A5, and A6, etc.

[0149] In some embodiments, antigen binding proteins comprise variable (V(D)J) regions of both heavy and light chain sequences identical to one of the clones in the library of PD-L1 binding clones, deposited under ATCC Accession NO. PTA-125513. In some embodiments, antigen binding proteins comprise variable (V(D)J) regions of either heavy or light chain sequence identical to one of the clones in the library of PD-L1 binding clones, deposited under ATCC Accession NO. PTA-125513. In some embodiments, antigen binding proteins are expressed from the expression vector in one of the clones in the library of PD-L1 binding clones, deposited under ATCC Accession NO. PTA-125513.

[0150] Also shown below are the locations of the CDRs (underlined) that create part of the antigen-binding site, while the Framework Regions (FRs) are the intervening segments of these variable domain sequences. In both light chain variable regions and heavy chain variable regions there are three CDRs (CDR1-3) and four FRs (FR 1-4). The CDR regions of each light and heavy chain also are grouped by antibody type (A1, A2, A3, etc.). Antigen binding proteins of the present disclosure include, for example, antigen binding proteins having a combination of light chain and heavy chain variable domains selected from the group of combinations consisting of L1H1 (antibody A1), L2H2 (antibody A2), L3H3 (antibody A3), L4H4 (antibody A4), L5H5 (antibody A5), L6H6 (antibody A6), L7H7 (antibody A7), L8H8 (antibody A8), L9H9 (antibody A9), L10H10 (antibody A10), L11H11 (antibody A11), L12H12 (antibody A12), L13H13 (antibody A13), . . . and L25H25 (antibody A25).

[0151] In some embodiments, antigen binding proteins comprise all six CDR sequences (three CDRs of light chain and three CDRs of heavy chain) identical to one of the clones in the library of PD-L1 binding clones, deposited under ATCC Accession NO. PTA-125513. In some embodiments, antigen binding proteins comprise three out of six CDR sequences (three CDRs of light chain or three CDRs of heavy chain) identical to one of the clones in the library of PD-L1 binding clones, deposited under ATCC Accession NO. PTA-125513. In some embodiments, antigen binding proteins comprise one, two, three, four, or five out of six CDR sequences identical to one of the clones in the library of PD-L1 binding clones, deposited under ATCC Accession NO. PTA-125513.

[0152] In one embodiment, the present disclosure provides an antigen binding protein comprising a light chain variable domain comprising a sequence of amino acids that differs from the sequence of a light chain variable domain selected from the group consisting of L1 through L25 only at 15, 14, 13, 12, 11, 10, 9, 8, 7, 6, 5, 4, 3, 2, or 1 residues, wherein each such sequence difference is independently either a deletion, insertion, or substitution of one amino acid residue. In another embodiment, the light-chain variable domain comprises a sequence of amino acids that is at least 70%, 75%, 80%, 85%, 90%, 95%, 96%, 97%, 98%, or 99% identical to the sequence of a light chain variable domain selected from the group consisting of L1-L25. In another embodiment, the light chain variable domain comprises a sequence of amino acids that is encoded by a nucleotide sequence that is at least 70%, 75%, 80%, 85%, 90%, 95%, 96%, 97%, 98%, or 99% identical to a nucleotide sequence that encodes a light chain variable domain selected from the group consisting of L1-L25 (which includes L1, L2, L3, L4, L5, L6, L7, L8, L9, L10, L11, L12, L13, . . . and L25). In another embodiment, the light chain variable domain comprises a sequence of amino acids that is encoded by a polynucleotide that hybridizes under moderately stringent conditions to the complement of a polynucleotide that encodes a light chain variable domain selected from the group consisting of L1-L25. In another embodiment, the light chain variable domain comprises a sequence of amino acids that is encoded by a polynucleotide that hybridizes under moderately stringent conditions to the complement of a polynucleotide that encodes a light chain variable domain selected from the group consisting of L1-L25. In another embodiment, the light chain variable domain comprises a sequence of amino acids that is encoded by a polynucleotide that hybridizes under moderately stringent conditions to a complement of a light chain polynucleotide of L1-L25.

[0153] In one embodiment, the present disclosure provides an antigen binding protein comprising a light chain variable domain comprising a sequence of amino acids that differs from the sequence of a light chain variable domain encoded by one of the clones of the library of PD-L1 binding clones, deposited under ATCC Accession No. PTA-125513, only at 15, 14, 13, 12, 11, 10, 9, 8, 7, 6, 5, 4, 3, 2, or 1 residues, wherein each such sequence difference is independently either a deletion, insertion, or substitution of one amino acid residue. In another embodiment, the light-chain variable domain comprises a sequence of amino acids that is at least 70%, 75%, 80%, 85%, 90%, 95%, 96%, 97%, 98%, or 99% identical to the sequence of a light chain variable domain encoded by one of the clones of the library of PD-L1 binding clones, deposited under ATCC Accession No. PTA-125513. In another embodiment, the light chain variable domain comprises a sequence of amino acids that is encoded by a nucleotide sequence that is at least 70%, 75%, 80%, 85%, 90%, 95%, 96%, 97%, 98%, or 99% identical to a nucleotide sequence of one of the clones of the library of PD-L1 binding clones, deposited under ATCC Accession No. PTA-125513.

[0154] In another embodiment, the present disclosure provides an antigen binding protein comprising a heavy chain variable domain comprising a sequence of amino acids that differs from the sequence of a heavy chain variable domain selected from the group consisting of H1-H24 only at 15, 14, 13, 12, 11, 10, 9, 8, 7, 6, 5, 4, 3, 2, or 1 residue(s), wherein each such sequence difference is independently either a deletion, insertion, or substitution of one amino acid residue. In another embodiment, the heavy chain variable domain comprises a sequence of amino acids that is at least 70%, 75%, 80%, 85%, 90%, 95%, 97%, or 99% identical to the sequence of a heavy chain variable domain selected from the group consisting of H1-H24. In another embodiment, the heavy chain variable domain comprises a sequence of amino acids that is encoded by a nucleotide sequence that is at least 70%, 75%, 80%, 85%, 90%, 95%, 97%, or 99% identical to a nucleotide sequence that encodes a heavy chain variable domain selected from the group consisting of H1-H24. In another embodiment, the heavy chain variable domain comprises a sequence of amino acids that is encoded by a polynucleotide that hybridizes under moderately stringent conditions to the complement of a polynucleotide that encodes a heavy chain variable domain selected from the group consisting of H1-H24. In another embodiment, the heavy chain variable domain comprises a sequence of amino acids that is encoded by a polynucleotide that hybridizes under moderately stringent conditions to the complement of a polynucleotide that encodes a heavy chain variable domain selected from the group consisting of H1-H24. In another embodiment, the heavy chain variable domain comprises a sequence of amino acids that is encoded by a polynucleotide that hybridizes under moderately stringent conditions to a complement of a heavy chain polynucleotide disclosed herein.

[0155] In one embodiment, the present disclosure provides an antigen binding protein comprising a heavy chain variable domain comprising a sequence of amino acids that differs from the sequence of a heavy chain variable domain encoded by one of the clones of the library of PD-L1 binding clones, deposited under ATCC Accession NO. PTA-125513, only at 15, 14, 13, 12, 11, 10, 9, 8, 7, 6, 5, 4, 3, 2, or 1 residues, wherein each such sequence difference is independently either a deletion, insertion, or substitution of one amino acid residue. In another embodiment, the heavy chain variable domain comprises a sequence of amino acids that is at least 70%, 75%, 80%, 85%, 90%, 95%, 96%, 97%, 98%, or 99% identical to the sequence of a heavy chain variable domain encoded by one of the clones of the library of PD-L1 binding clones, deposited under ATCC Accession NO. PTA-125513. In another embodiment, the heavy chain variable domain comprises a sequence of amino acids that is encoded by a nucleotide sequence that is at least 70%, 75%, 80%, 85%, 90%, 95%, 96%, 97%, 98%, or 99% identical to a nucleotide sequence of one of the clones of the library of PD-L1 binding clones, deposited under ATCC Accession NO. PTA-125513.

[0156] Particular embodiments of antigen binding proteins of the present disclosure comprise one or more amino acid sequences that are identical to the amino acid sequences of one or more of the CDRs and/or FRs referenced herein. In one embodiment, the antigen binding protein comprises a light chain CDR1 sequence illustrated above. In another embodiment, the antigen binding protein comprises a light chain CDR2 sequence illustrated above. In another embodiment, the antigen binding protein comprises a light chain CDR3 sequence illustrated above. In another embodiment, the antigen binding protein comprises a heavy chain CDR1 sequence illustrated above. In another embodiment, the antigen binding protein comprises a heavy chain CDR2 sequence illustrated above. In another embodiment, the antigen binding protein comprises a heavy chain CDR3 sequence illustrated above.

[0157] In one embodiment, the present disclosure provides an antigen binding protein that comprises one or more CDR sequences that differ from a CDR sequence shown above by no more than 5, 4, 3, 2, or 1 amino acid residues.

[0158] In some embodiments, at least one of the antigen binding protein's CDR1 sequences is a CDR1 sequence from A1-A25, CDR1-L1 to 25, or CDR1-H1 to 25 as shown in TABLE 5. In some embodiments, at least one of the antigen binding protein's CDR2 sequences is a CDR2 sequence from A1-A25, CDR2-L1 to 25, or CDR2-H1 to 25 as shown in TABLE 5. In some embodiments, at least one of the antigen binding protein's CDR3 sequences is a CDR3 sequence from A1-A25, CDR3-L1 to 25, or CDR3-H1 to 25 as shown in TABLE 5.

[0159] In another embodiment, the antigen binding protein's light chain CDR3 sequence is a light chain CDR3 sequence from A1-A4 or CDR3-L1 to 4, as shown in TABLE 5, and the antigen binding protein's heavy chain CDR3 sequence is a heavy chain sequence from A1-A25 or CDR-H1 to 25, as shown in TABLE 5.

[0160] In another embodiment, the antigen binding protein comprises 1, 2, 3, 4, or 5 CDR sequence(s) that each independently differs by 6, 5, 4, 3, 2, 1, or 0 single amino acid additions, substitutions, and/or deletions from a CDR sequence of A1-A25, and the antigen binding protein further comprises 1, 2, 3, 4, or 5 CDR sequence(s) that each independently differs by 6, 5, 4, 3, 2, 1, or 0 single amino acid additions, substitutions, and/or deletions from a CDR sequence. In some embodiments, the antigen binding protein comprises 1, 2, 3, 4, or 5 CDR sequence(s) that each has at least 50%, 55%, 60%, 65%, 70%, 75%, 80%, 85%, 90%, 95%, 96%, 97%, 98%, or 99% sequence identity to a CDR sequence of A1-A25.

[0161] The nucleotide sequences of A1-A25, or the amino acid sequences of A1-A25, can be altered, for example, by random mutagenesis or by site-directed mutagenesis (e.g., oligonucleotide-directed site-specific mutagenesis) to create an altered polynucleotide comprising one or more particular nucleotide substitutions, deletions, or insertions as compared to the non-mutated polynucleotide. Examples of techniques for making such alterations are described in Walder et al., 1986, Gene 42:133; Bauer et al. 1985, Gene 37:73; Craik, BioTechniques, January 1985, 12-19; Smith et al., 1981, Genetic Engineering: Principles and Methods, Plenum Press; and U.S. Pat. Nos. 4,518,584 and 4,737,462. These and other methods can be used to make, for example, derivatives of anti-PD-L1 antibodies that have a desired property, for example, increased affinity, avidity, or specificity for PD-L1, increased activity or stability in vivo or in vitro, or reduced in vivo side-effects as compared to the underivatized antibody.

[0162] Other derivatives of anti-PD-L1 antibodies within the scope of this disclosure include covalent or aggregative conjugates of anti-PD-L1 antibodies, or fragments thereof, with other proteins or polypeptides, such as by expression of recombinant fusion proteins comprising heterologous polypeptides fused to the N-terminus or C-terminus of an anti-PD-L1 antibody polypeptide. For example, the conjugated peptide may be a heterologous signal (or leader) polypeptide, e.g., the yeast alpha-factor leader, or a peptide such as an epitope tag. Antigen binding protein-containing fusion proteins can comprise peptides added to facilitate purification or identification of antigen binding protein (e.g., poly-His). An antigen binding protein also can be linked to the FLAG peptide Asp-Tyr-Lys-Asp-Asp-Asp-Asp-Lys (DYKDDDDK) (SEQ ID NO: 7002) as described in Hopp et al., Bio/Technology 6:1204, 1988, and U.S. Pat. No. 5,011,912. The FLAG peptide is highly antigenic and provides an epitope reversibly bound by a specific monoclonal antibody (mAb), enabling rapid assay and facile purification of expressed recombinant protein. Reagents useful for preparing fusion proteins in which the FLAG peptide is fused to a given polypeptide are commercially available (Sigma, St. Louis, Mo.).

[0163] One suitable Fc polypeptide, described in PCT application WO 93/10151 (hereby incorporated by reference), is a single chain polypeptide extending from the N-terminal hinge region to the native C-terminus of the Fc region of a human IgG1 antibody. Another useful Fc polypeptide is the Fc mutein described in U.S. Pat. No. 5,457,035 and in Baum et al., 1994, EMBO J. 13:3992-4001. The amino acid sequence of this mutein is identical to that of the native Fc sequence presented in WO 93/10151, except that amino acid 19 has been changed from Leu to Ala, amino acid 20 has been changed from Leu to Glu, and amino acid 22 has been changed from Gly to Ala. The mutein exhibits reduced affinity for Fc receptors.

[0164] In other embodiments, the variable portion of the heavy and/or light chains of an anti-PD-L1 antibody may be substituted for the variable portion of an antibody heavy and/or light chain.

[0165] Oligomers that contain one or more antigen binding proteins may be employed as PD-L1 antagonists or agonists. Oligomers may be in the form of covalently-linked or non-covalently-linked dimers, trimers, or higher oligomers. Oligomers comprising two or more antigen binding protein are contemplated for use, with one example being a homodimer. Other oligomers include heterodimers, homotrimers, heterotrimers, homotetramers, heterotetramers, etc.

[0166] One embodiment is directed to oligomers comprising multiple antigen binding proteins joined via covalent or non-covalent interactions between peptide moieties fused to the antigen binding proteins. Such peptides may be peptide linkers (spacers), or peptides that have the property of promoting oligomerization. Leucine zippers and certain polypeptides derived from antibodies are among the peptides that can promote oligomerization of antigen binding proteins attached thereto, as described in more detail below.

[0167] In particular embodiments, the oligomers comprise from two to four antigen binding proteins. The antigen binding proteins of the oligomer may be in any form, such as any of the forms described above, e.g., variants or fragments. Preferably, the oligomers comprise antigen binding proteins that have PD-L1 binding activity.

[0168] In one embodiment, an oligomer is prepared using polypeptides derived from immunoglobulins. Preparation of fusion proteins comprising certain heterologous polypeptides fused to various portions of antibody-derived polypeptides (including the Fc domain) has been described, e.g., by Ashkenazi et al., 1991, PNAS USA 88:10535; Byrn et al., 1990, Nature 344:677; and Hollenbaugh et al., 1992 Curr. Prot.s in Immunol., Suppl. 4, pages 10.19.1-10.19.11.

[0169] One embodiment of the present disclosure is directed to a dimer comprising two fusion proteins created by fusing a PD-L1 binding fragment of an anti-PD-L1 antibody to the Fc region of an antibody. The dimer can be made by, for example, inserting a gene fusion encoding the fusion protein into an appropriate expression vector, expressing the gene fusion in host cells transformed with the recombinant expression vector, and allowing the expressed fusion protein to assemble much like antibody molecules, whereupon interchain disulfide bonds form between the Fc moieties to yield the dimer.

[0170] Alternatively, the oligomer is a fusion protein comprising multiple antigen binding proteins, with or without peptide linkers (spacer peptides). Among the suitable peptide linkers are those described in U.S. Pat. Nos. 4,751,180 and 4,935,233.

[0171] Another method for preparing oligomeric antigen binding proteins involves use of a leucine zipper. Leucine zipper domains are peptides that promote oligomerization of the proteins in which they are found. Leucine zippers were originally identified in several DNA-binding proteins (Landschulz et al., 1988, Science 240:1759), and have since been found in a variety of different proteins. Among the known leucine zippers are naturally occurring peptides and derivatives thereof that dimerize or trimerize. Examples of leucine zipper domains suitable for producing soluble oligomeric proteins are described in PCT application WO 94/10308, and the leucine zipper derived from lung surfactant protein D (SPD) described in Hoppe et al., 1994, FEBS Letters 344:191, hereby incorporated by reference. The use of a modified leucine zipper that allows for stable trimerization of a heterologous protein fused thereto is described in Fanslow et al., 1994, Semin. Immunol. 6:267-78. In one approach, recombinant fusion proteins comprising an anti-PD-L1 antibody fragment or derivative fused to a leucine zipper peptide are expressed in suitable host cells, and the soluble oligomeric anti-PD-L1 antibody fragments or derivatives that form are recovered from the culture supernatant.

[0172] In one aspect, the present disclosure provides antigen binding proteins that interfere with the binding of PD-L1 to its ligands. Such antigen binding proteins can be made against PD-L1, or a fragment, variant or derivative thereof, and screened in conventional assays for the ability to interfere with binding of PD-L1 to its ligands. Examples of suitable assays are assays that test the antigen binding proteins for the ability to inhibit binding of PD-L1 ligands to cells expressing PD-L1, or that test antigen binding proteins for the ability to reduce a biological or cellular response that results from the binding of PD-L1 ligands to cell surface PD-L1. For example, antibodies can be screened according to their ability to bind to immobilized antibody surfaces (PD-L1). Antigen binding proteins that block the binding of PD-L1 to a ligand can be employed in treating any PD-L1-related condition, including but not limited to cancer or autoimmune disease. In an embodiment, a human anti-PD-L1 monoclonal antibody generated by procedures involving immunization of transgenic mice is employed in treating such conditions.

[0173] Antigen-binding fragments of antigen binding proteins of the present disclosure can be produced by conventional techniques. Examples of such fragments include, but are not limited to, Fab and F(ab′)₂ fragments. Antibody fragments and derivatives produced by genetic engineering techniques also are contemplated.

[0174] Additional embodiments include chimeric antibodies, e.g., humanized versions of non-human (e.g., murine) monoclonal antibodies. Such humanized antibodies may be prepared by known techniques, and offer the advantage of reduced immunogenicity when the antibodies are administered to humans. In one embodiment, a humanized monoclonal antibody comprises the variable domain of a murine antibody (or all or part of the antigen binding site thereof) and a constant domain derived from a human antibody. Alternatively, a humanized antibody fragment may comprise the antigen binding site of a murine monoclonal antibody and a variable domain fragment (lacking the antigen-binding site) derived from a human antibody. Procedures for the production of chimeric and further engineered monoclonal antibodies include those described in Riechmann et al., 1988, Nature 332:323, Liu et al., 1987, Proc. Nat. Acad. Sci. USA 84:3439, Larrick et al., 1989, Bio/Technology 7:934, and Winter et al., 1993, TIPS 14:139. In one embodiment, the chimeric antibody is a CDR grafted antibody. Techniques for humanizing antibodies are discussed in, e.g., U.S. Pat. Nos. 5,869,619, 5,225,539, 5,821,337, 5,859,205, 6,881,557, Padlan et al., 1995, FASEB J. 9:133-39, and Tamura et al., 2000, J. Immunol. 164:1432-41.

[0175] Procedures have been developed for generating human or partially human antibodies in non-human animals. For example, mice in which one or more endogenous immunoglobulin genes have been inactivated by various means have been prepared. Human immunoglobulin genes have been introduced into the mice to replace the inactivated mouse genes. Antibodies produced in the animal incorporate human immunoglobulin polypeptide chains encoded by the human genetic material introduced into the animal. In one embodiment, a non-human animal, such as a transgenic mouse, is immunized with a PD-L1 polypeptide, such that antibodies directed against the PD-L1 polypeptide are generated in the animal.

[0176] One example of a suitable immunogen is a soluble human PD-L1, such as a polypeptide comprising the extracellular domain of the protein having the following sequence: SEQ ID: 7001 or other immunogenic fragment of the protein. Examples of techniques for production and use of transgenic animals for the production of human or partially human antibodies are described in U.S. Pat. Nos. 5,814,318, 5,569,825, and 5,545,806, Davis et al., 2003, Production of human antibodies from transgenic mice in Lo, ed. Antibody Engineering: Methods and Protocols, Humana Press, NJ:191-200, Kellermann et al., 2002, Curr Opin Biotechnol. 13:593-97, Russel et al., 2000, Infect Immun. 68:1820-26, Gallo et al., 2000, Eur J Immun. 30:534-40, Davis et al., 1999, Cancer Metastasis Rev. 18:421-25, Green, 1999, J Immunol Methods. 231:11-23, Jakobovits, 1998, Advanced Drug Delivery Reviews 31:33-42, Green et al., 1998, J Exp Med. 188:483-95, Jakobovits A, 1998, Exp. Opin. Invest. Drugs. 7:607-14, Tsuda et al., 1997, Genomics. 42:413-21, Mendez et al., 1997, Nat Genet. 15:146-56, Jakobovits, 1994, Curr Biol. 4:761-63, Arbones et al., 1994, Immunity. 1:247-60, Green et al., 1994, Nat Genet. 7:13-21, Jakobovits et al., 1993, Nature. 362:255-58, Jakobovits et al., 1993, Proc Natl Acad Sci USA. 90:2551-55. Chen, J., M. Trounstine, F. W. Alt, F. Young, C. Kurahara, J. Loring, D. Huszar. Inter'l Immunol. 5 (1993): 647-656, Choi et al., 1993, Nature Genetics 4: 117-23, Fishwild et al., 1996, Nature Biotech. 14: 845-51, Harding et al., 1995, Annals of the New York Academy of Sciences, Lonberg et al., 1994, Nature 368: 856-59, Lonberg, 1994, Transgenic Approaches to Human Monoclonal Antibodies in Handbook of Experimental Pharmacology 113: 49-101, Lonberg et al., 1995, Internal Review of Immunology 13: 65-93, Neuberger, 1996, Nature Biotechnology 14: 826, Taylor et al., 1992, Nucleic Acids Res. 20: 6287-95, Taylor et al., 1994, Inter'l Immunol. 6: 579-91, Tomizuka et al., 1997, Nature Genetics 16: 133-43, Tomizuka et al., 2000, Pro. Nat'l Acad. Sci. USA 97: 722-27, Tuaillon et al., 1993, Pro. Nat'l Acad. Sci. USA 90: 3720-24, and Tuaillon et al., 1994, J. Immunol. 152: 2912-20.

[0177] Antigen binding proteins (e.g., antibodies, antibody fragments, and antibody derivatives) of the present disclosure can comprise any constant region known in the art. The light chain constant region can be, for example, a kappa- or lambda-type light chain constant region, e.g., a human kappa- or lambda-type light chain constant region. The heavy chain constant region can be, for example, an alpha-, delta-, epsilon-, gamma-, or mu-type heavy chain constant regions, e.g., a human alpha-, delta-, epsilon-, gamma-, or mu-type heavy chain constant region. In one embodiment, the light or heavy chain constant region is a fragment, derivative, variant, or mutein of a naturally occurring constant region.

[0178] Techniques are known for deriving an antibody of a different subclass or isotype from an antibody of interest, i.e., subclass switching. Thus, IgG antibodies may be derived from an IgM antibody, for example, and vice versa. Such techniques allow the preparation of new antibodies that possess the antigen-binding properties of a given antibody (the parent antibody), but also exhibit biological properties associated with an antibody isotype or subclass different from that of the parent antibody. Recombinant DNA techniques may be employed. Cloned DNA encoding particular antibody polypeptides may be employed in such procedures, e.g., DNA encoding the constant domain of an antibody of the desired isotype. See also Lantto et al., 2002, Methods Mol. Biol. 178:303-16.

[0179] In one embodiment, an antigen binding protein of the present disclosure comprises the IgG1 heavy chain domain of any of A1-A25 (H1-H25) or a fragment of the IgG1 heavy chain domain of any of A1-A25 (H1-H25). In another embodiment, an antigen binding protein of the present disclosure comprises the kappa light chain constant chain region of A1-A25 (L1-L25), or a fragment of the kappa light chain constant region of A1-A25 (L1-L25). In another embodiment, an antigen binding protein of the present disclosure comprises both the IgG1 heavy chain domain, or a fragment thereof, of A1-A25 (L1-L25) and the kappa light chain domain, or a fragment thereof, of A1-A25 (L1-L25).

[0180] Accordingly, the antigen binding proteins of the present disclosure include those comprising, for example, the variable domain combinations L1H1, L2H2, L3H3, L4H4, L5H5, L6H6, L7H7, L8H8, L9H9, L10H10, L11H11, L12H12, L13H13, . . . and L23H23, having a desired isotype (for example, IgA, IgG1, IgG2, IgG3, IgG4, IgM, IgE, and IgD) as well as Fab or F(ab′)₂ fragments thereof. Moreover, if an IgG4 is desired, it may also be desired to introduce a point mutation (CPSCP (SEQ ID NO: 9225)->CPPCP (SEQ ID NO: 9226)) in the hinge region as described in Bloom et al., 1997, Protein Science 6:407, incorporated by reference herein) to alleviate a tendency to form intra-H chain disulfide bonds that can lead to heterogeneity in the IgG4 antibodies.

[0181] In one embodiment, the antigen binding protein has a K_{off} of 1×10⁻⁴ s⁻¹ or lower. In another embodiment, the K_{off} is 5×10⁻⁵ s⁻¹ or lower. In another embodiment, the K_{off} is substantially the same as an antibody having a combination of light chain and heavy chain variable domain sequences selected from the group of combinations consisting of L1H1, L2H2, L3H3, L4H4, L5H5, L6H6, . . . and L25H25. In another embodiment, the antigen binding protein binds to PD-L1 with substantially the same K_{off} as an antibody that comprises one or more CDRs from an antibody having a combination of light chain and heavy chain variable domain sequences selected from the group of combinations consisting of L1H1, L2H2, L3H3, L4H4, L5H5, L6H6, . . . and L25H25. In another embodiment, the antigen binding protein binds to PD-L1 with substantially the same K_{off} as an antibody that comprises one of the amino acid sequences illustrated above. In another embodiment, the antigen binding protein binds to PD-L1 with substantially the same K_{off} as an antibody that comprises one or more CDRs from an antibody that comprises one of the amino acid sequences illustrated above.

[0182] In one aspect, the present disclosure provides antigen-binding fragments of an anti-PD-L1 antibody of the present disclosure. Such fragments can consist entirely of antibody-derived sequences or can comprise additional sequences. Examples of antigen-binding fragments include Fab, F(ab′)₂, single chain antibodies, diabodies, triabodies, tetrabodies, and domain antibodies. Other examples are provided in Lunde et al., 2002, Biochem. Soc. Trans. 30:500-06.

[0183] Single chain antibodies (scFv) may be formed by linking heavy and light chain variable domain (Fv region) fragments via an amino acid bridge (short peptide linker, e.g., a synthetic sequence of amino acid residues), resulting in a single polypeptide chain. Such single-chain Fvs (scFvs) have been prepared by fusing DNA encoding a peptide linker between DNAs encoding the two variable domain polypeptides (V_{L} and V_{H}). The resulting polypeptides can fold back on themselves to form antigen-binding monomers, or they can form multimers (e.g., dimers, trimers, or tetramers), depending on the length of a flexible linker between the two variable domains (Kortt et al., 1997, Prot. Eng. 10:423; Kortt et al., 2001, Biomol. Eng. 18:95-108, Bird et al., 1988, Science 242:423-26 and Huston et al., 1988, Proc. Natl. Acad. Sci. USA 85:5879-83). By combining different V_{L} and V_{H}-comprising polypeptides, one can form multimeric scFvs that bind to different epitopes (Kriangkum et al., 2001, Biomol. Eng. 18:31-40). Techniques developed for the production of single chain antibodies include those described in U.S. Pat. No. 4,946,778; Bird, 1988, Science 242:423; Huston et al., 1988, Proc. Natl. Acad. Sci. USA 85:5879; Ward et al., 1989, Nature 334:544, de Graaf et al., 2002, Methods Mol Biol. 178:379-87. ScFvs comprising the variable domain combinations L1H1, L2H2, L3H3, L4H4, L5H5, L6H6, . . . , and L25H25 are encompassed by the present disclosure.

[0184] 7.7. Monoclonal Antibody

[0185] In another aspect, the present disclosure provides monoclonal antibodies that bind to PD-L1. Monoclonal antibodies of the present disclosure may be generated using a variety of known techniques. In general, monoclonal antibodies that bind to specific antigens may be obtained by methods known to those skilled in the art (see, for example, Kohler et al., Nature 256:495, 1975; Coligan et al. (eds.), Current Protocols in Immunology, 1:2.5.12.6.7 (John Wiley & Sons 1991); U.S. Pat. Nos. RE 32,011, 4,902,614, 4,543,439, and 4,411,993; Monoclonal Antibodies, Hybridomas: A New Dimension in Biological Analyses, Plenum Press, Kennett, McKearn, and Bechtol (eds.) (1980); and Antibodies: A Laboratory Manual, Harlow and Lane (eds.), Cold Spring Harbor Laboratory Press (1988); Picksley et al., “Production of monoclonal antibodies against proteins expressed in E. coli,” in DNA Cloning 2: Expression Systems, 2nd Edition, Glover et al. (eds.), page 93 (Oxford University Press 1995)). Antibody fragments may be derived therefrom using any suitable standard technique such as proteolytic digestion, or optionally, by proteolytic digestion (for example, using papain or pepsin) followed by mild reduction of disulfide bonds and alkylation. Alternatively, such fragments may also be generated by recombinant genetic engineering techniques as described herein.

[0186] Monoclonal antibodies can be obtained by injecting an animal, for example, a rat, hamster, a rabbit, or preferably a mouse, including for example a transgenic or a knock-out, as known in the art, with an immunogen comprising human PD-L1 [sequence SEQ ID 7001] or a fragment thereof, according to methods known in the art and described herein. The presence of specific antibody production may be monitored after the initial injection and/or after a booster injection by obtaining a serum sample and detecting the presence of an antibody that binds to human PD-L1 or peptide using any one of several immunodetection methods known in the art and described herein. From animals producing the desired antibodies, lymphoid cells, most commonly cells from the spleen or lymph node, are removed to obtain B-lymphocytes. The B lymphocytes are then fused with a drug-sensitized myeloma cell fusion partner, preferably one that is syngeneic with the immunized animal and that optionally has other desirable properties (e.g., inability to express endogenous Ig gene products, e.g., P3X63-Ag 8.653 (ATCC No. CRL 1580); NSO, SP20) to produce hybridomas, which are immortal eukaryotic cell lines.

[0187] The lymphoid (e.g., spleen) cells and the myeloma cells may be combined for a few minutes with a membrane fusion-promoting agent, such as polyethylene glycol or a nonionic detergent, and then plated at low density on a selective medium that supports the growth of hybridoma cells but not unfused myeloma cells. A preferred selection media is HAT (hypoxanthine, aminopterin, thymidine). After a sufficient time, usually about one to two weeks, colonies of cells are observed. Single colonies are isolated, and antibodies produced by the cells may be tested for binding activity to human PD-L1, using any one of a variety of immunoassays known in the art and described herein. The hybridomas are cloned (e.g., by limited dilution cloning or by soft agar plaque isolation) and positive clones that produce an antibody specific to PD-L1 are selected and cultured. The monoclonal antibodies from the hybridoma cultures may be isolated from the supernatants of hybridoma cultures.

[0188] An alternative method for production of a murine monoclonal antibody is to inject the hybridoma cells into the peritoneal cavity of a syngeneic mouse, for example, a mouse that has been treated (e.g., pristane-primed) to promote formation of ascites fluid containing the monoclonal antibody. Monoclonal antibodies can be isolated and purified by a variety of well-established techniques. Such isolation techniques include affinity chromatography with Protein-A Sepharose, size-exclusion chromatography, and ion-exchange chromatography (see, for example, Coligan at pages 2.7.1-2.7.12 and pages 2.9.1-2.9.3; Baines et al., “Purification of Immunoglobulin G (IgG),” in Methods in Molecular Biology, Vol. 10, pages 79-104 (The Humana Press, Inc. 1992)). Monoclonal antibodies may be purified by affinity chromatography using an appropriate ligand selected based on particular properties of the antibody (e.g., heavy or light chain isotype, binding specificity, etc.). Examples of a suitable ligand, immobilized on a solid support, include Protein A, Protein G, an anticonstant region (light chain or heavy chain) antibody, an anti-idiotype antibody, and a TGF-beta binding protein, or fragment or variant thereof.

[0189] Monoclonal antibodies may be produced using any technique known in the art, e.g., by immortalizing spleen cells harvested from the transgenic animal after completion of the immunization schedule. The spleen cells can be immortalized using any technique known in the art, e.g., by fusing them with myeloma cells to produce hybridomas. Hybridoma cell lines are identified that produce an antibody that binds a PD-L1 polypeptide. Such hybridoma cell lines, and anti-PD-L1 monoclonal antibodies produced by them, are encompassed by the present disclosure. Myeloma cells for use in hybridoma-producing fusion procedures preferably are non-antibody-producing, have high fusion efficiency, and enzyme deficiencies that render them incapable of growing in certain selective media which support the growth of only the desired fused cells (hybridomas). Examples of suitable cell lines for use in mouse fusions include Sp-20, P3-X63/Ag8, P3-X63-Ag8.653, NS1/1.Ag4 1, Sp210-Ag14, FO, NSO/U, MPC-11, MPC11-X45-GTG 1.7 and S194/5XX0 Bul; examples of cell lines used in rat fusions include R210.RCY3, Y3-Ag 1.2.3, IR983F and 4B210. Other cell lines useful for cell fusions are U-266, GM1500-GRG2, LICR-LON-HMy2 and UC729-6. Hybridomas or mAbs may be further screened to identify mAbs with particular properties, such as the ability to block a PD-L1-induced activity.

[0190] An antibody of the present disclosure may also be a fully human monoclonal antibody. An isolated fully human antibody is provided that specifically binds to the PD-L1, wherein the antigen binding protein possesses at least one in vivo biological activity of a human anti-PD-L1 antibody.

[0191] 7.8. Method of Generating Antibodies

[0192] Fully human monoclonal antibodies may be generated by any number of techniques with which those having ordinary skill in the art will be familiar. Such methods include, but are not limited to, Epstein Barr Virus (EBV) transformation of human peripheral blood cells (e.g., containing B lymphocytes), in vitro immunization of human B-cells, fusion of spleen cells from immunized transgenic mice carrying inserted human immunoglobulin genes, isolation from human immunoglobulin V region phage libraries, or other procedures as known in the art and based on the disclosure herein. For example, fully human monoclonal antibodies may be obtained from transgenic mice that have been engineered to produce specific human antibodies in response to antigenic challenge. Methods for obtaining fully human antibodies from transgenic mice are described, for example, by Green et al., Nature Genet. 7:13, 1994; Lonberg et al., Nature 368:856, 1994; Taylor et al., Int. Immun. 6:579, 1994; U.S. Pat. No. 5,877,397; Bruggemann et al., 1997 Curr. Opin. Biotechnol. 8:455-58; Jakobovits et al., 1995 Ann. N. Y. Acad. Sci. 764:525-35. In this technique, elements of the human heavy and light chain locus are introduced into strains of mice derived from embryonic stem cell lines that contain targeted disruptions of the endogenous heavy chain and light chain loci (see also Bruggemann et al., Curr. Opin. Biotechnol. 8:455-58 (1997)). For example, human immunoglobulin transgenes may be mini-gene constructs, or transloci on yeast artificial chromosomes, which undergo B-cell-specific DNA rearrangement and hypermutation in the mouse lymphoid tissue. Fully human monoclonal antibodies may be obtained by immunizing the transgenic mice, which may then produce human antibodies specific for PD-L1. Lymphoid cells of the immunized transgenic mice can be used to produce human antibody-secreting hybridomas according to the methods described herein. Polyclonal sera containing fully human antibodies may also be obtained from the blood of the immunized animals.

[0193] Another method for generating human antibodies of the present disclosure includes immortalizing human peripheral blood cells by EBV transformation. See, e.g., U.S. Pat. No. 4,464,456. Such an immortalized B-cell line (or lymphoblastoid cell line) producing a monoclonal antibody that specifically binds to PD-L1 can be identified by immunodetection methods as provided herein, for example, an ELISA, and then isolated by standard cloning techniques. The stability of the lymphoblastoid cell line producing an anti-PD-L1 antibody may be improved by fusing the transformed cell line with a murine myeloma to produce a mouse-human hybrid cell line according to methods known in the art (see, e.g., Glasky et al., Hybridoma 8:377-89 (1989)). Still another method to generate human monoclonal antibodies is in vitro immunization, which includes priming human splenic B-cells with human PD-L1, followed by fusion of primed B-cells with a heterohybrid fusion partner. See, e.g., Boerner et al., 1991 J. Immunol. 147:86-95.

[0194] In certain embodiments, a B-cell that is producing an anti-human PD-L1 antibody is selected and the light chain and heavy chain variable regions are cloned from the B-cell according to molecular biology techniques known in the art (WO 92/02551; U.S. Pat. No. 5,627,052; Babcook et al., Proc. Natl. Acad. Sci. USA 93:7843-48 (1996)) and described herein. B-cells from an immunized animal may be isolated from the spleen, lymph node, or peripheral blood sample by selecting a cell that is producing an antibody that specifically binds to PD-L1. B-cells may also be isolated from humans, for example, from a peripheral blood sample.

[0195] Methods for detecting single B-cells that are producing an antibody with the desired specificity are well known in the art, for example, by plaque formation, fluorescence-activated cell sorting, in vitro stimulation followed by detection of specific antibody, and the like. Methods for selection of specific antibody-producing B-cells include, for example, preparing a single cell suspension of B-cells in soft agar that contains human PD-L1. Binding of the specific antibody produced by the B-cell to the antigen results in the formation of a complex, which may be visible as an immunoprecipitate.

[0196] In some embodiments, specific antibody-producing B-cells are selected by using a method that allows identification natively paired antibodies. For example, a method described in Adler et al., A natively paired antibody library yields drug leads with higher sensitivity and specificity than a randomly paired antibody library, MAbs (2018), which is incorporated by reference in its entirety herein, can be employed. The method combines microfluidic technology, molecular genomics, yeast single-chain variable fragment (scFv) display, fluorescence-activated cell sorting (FACS) and deep sequencing as summarized in FIG. 1 adapted from Adler et al. In short, B cells can be isolated from immunized animals and then pooled. The B cells are encapsulated into droplets with oligo-dT beads and a lysis solution, and mRNA-bound beads are purified from the droplets, and then injected into a second emulsion with an OE-RT-PCR amplification mix that generates DNA amplicons that encode scFv with native pairing of heavy and light chain Ig. Libraries of natively paired amplicons are then electroporated into yeast for scFv display. FACS is used to identify high affinity scFv. Finally, deep antibody sequencing can be used to identify all clones in the pre- and post-sort scFv libraries.

[0197] After the B-cells producing the desired antibody are selected, the specific antibody genes may be cloned by isolating and amplifying DNA or mRNA according to methods known in the art and described herein.

[0198] The methods for obtaining antibodies of the present disclosure can also adopt various phage display technologies known in the art. See, e.g., Winter et al., 1994 Annu. Rev. Immunol. 12:433-55; Burton et al., 1994 Adv. Immunol. 57:191-280. Human or murine immunoglobulin variable region gene combinatorial libraries may be created in phage vectors that can be screened to select Ig fragments (Fab, Fv, sFv, or multimers thereof) that bind specifically to PD-L1 binding protein or variant or fragment thereof. See, e.g., U.S. Pat. No. 5,223,409; Huse et al., 1989 Science 246:1275-81; Sastry et al., Proc. Natl. Acad. Sci. USA 86:5728-32 (1989); Alting-Mees et al., Strategies in Molecular Biology 3:1-9 (1990); Kang et al., 1991 Proc. Natl. Acad. Sci. USA 88:4363-66; Hoogenboom et al., 1992 1 Molec. Biol. 227:381-388; Schlebusch et al., 1997 Hybridoma 16:47-52 and references cited therein. For example, a library containing a plurality of polynucleotide sequences encoding Ig variable region fragments may be inserted into the genome of a filamentous bacteriophage, such as M13 or a variant thereof, in frame with the sequence encoding a phage coat protein. A fusion protein may be a fusion of the coat protein with the light chain variable region domain and/or with the heavy chain variable region domain. According to certain embodiments, immunoglobulin Fab fragments may also be displayed on a phage particle (see, e.g., U.S. Pat. No. 5,698,426).

[0199] Antibody fragments fused to another protein, such as a minor coat protein, can be also used to enrich phage with antigen. Then, using a random combinatorial library of rearranged heavy (V_{H}) and light (V_{L}) chains from mice immune to the antigen (e.g. PD-L1), diverse libraries of antibody fragments are displayed on the surface of the phage. These libraries can be screened for complementary variable domains, and the domains purified by, for example, affinity column. See Clackson et al., Nature, V. 352 pp. 624-628 (1991).

[0200] Heavy and light chain immunoglobulin cDNA expression libraries may also be prepared in lambda phage, for example, using λImmunoZap™(H) and λImmunoZap™(L) vectors (Stratagene, La Jolla, Calif.). Briefly, mRNA is isolated from a B-cell population, and used to create heavy and light chain immunoglobulin cDNA expression libraries in the λImmunoZap(H) and λImmunoZap(L) vectors. These vectors may be screened individually or co-expressed to form Fab fragments or antibodies (see Huse et al., supra; see also Sastry et al., supra). Positive plaques may subsequently be converted to a non-lytic plasmid that allows high level expression of monoclonal antibody fragments from E. coli.

[0201] In one embodiment, in a hybridoma the variable regions of a gene expressing a monoclonal antibody of interest are amplified using nucleotide primers. These primers may be synthesized by one of ordinary skill in the art, or may be purchased from commercially available sources. (See, e.g., Stratagene (La Jolla, Calif.), which sells primers for mouse and human variable regions including, among others, primers for V_{Ha}, V_{Hb}, V_{Hc}, V_{Hd}, C_{H1}, V_{L} and C_{L} regions.) These primers may be used to amplify heavy or light chain variable regions, which may then be inserted into vectors such as ImmunoZAP™H or ImmunoZAP™L (Stratagene), respectively. These vectors may then be introduced into E. coli, yeast, or mammalian-based systems for expression. Large amounts of a single-chain protein containing a fusion of the V_{H} and V_{L} domains may be produced using these methods (see Bird et al., Science 242:423-426, 1988).

[0202] Once cells producing antibodies according to the disclosure have been obtained using any of the above-described immunization and other techniques, the specific antibody genes may be cloned by isolating and amplifying DNA or mRNA therefrom according to standard procedures as described herein. The antibodies produced therefrom may be sequenced and the CDRs identified and the DNA coding for the CDRs may be manipulated as described previously to generate other antibodies according to the disclosure.

[0203] PD-L1 binding agents of the present disclosure preferably modulate PD-L1 function in the cell-based assay described herein and/or the in vivo assay described herein and/or bind to one or more of the domains described herein and/or cross-block the binding of one of the antibodies described in this application and/or are cross-blocked from binding PD-L1 by one of the antibodies described in this application. Accordingly such binding agents can be identified using the assays described herein.

[0204] In certain embodiments, antibodies are generated by first identifying antibodies that bind to one or more of the domains provided herein and/or neutralize in the cell-based and/or in vivo assays described herein and/or cross-block the antibodies described in this application and/or are cross-blocked from binding PD-L1 by one of the antibodies described in this application. The CDR regions from these antibodies are then used to insert into appropriate biocompatible frameworks to generate PD-L1 binding agents. The non-CDR portion of the binding agent may be composed of amino acids, or may be a non-protein molecule. The assays described herein allow the characterization of binding agents. Preferably the binding agents of the present disclosure are antibodies as defined herein.

[0205] Other antibodies according to the disclosure may be obtained by conventional immunization and cell fusion procedures as described herein and known in the art.

[0206] Molecular evolution of the complementarity determining regions (CDRs) in the center of the antibody binding site also has been used to isolate antibodies with increased affinity, for example, antibodies having increased affinity for c-erbB-2, as described by Schier et al., 1996, J. Mol. Biol. 263:551. Accordingly, such techniques are useful in preparing antibodies to PD-L1. Antigen binding proteins directed against a PD-L1 can be used, for example, in assays to detect the presence of PD-L1 polypeptides, either in vitro or in vivo. The antigen binding proteins also may be employed in purifying PD-L1 proteins by immunoaffinity chromatography.

[0207] Although human, partially human, or humanized antibodies will be suitable for many applications, particularly those involving administration of the antibody to a human subject, other types of antigen binding proteins will be suitable for certain applications. Non-human antibodies can be derived from any antibody-producing animal, such as mouse, rat, rabbit, goat, donkey, or non-human primate (such as monkey (e.g., cynomolgus or rhesus monkey) or ape (e.g., chimpanzee)). An antibody from a particular species can be made by, for example, immunizing an animal of that species with the desired immunogen (e.g., a PD-L1 polypeptide) or using an artificial system for generating antibodies of that species (e.g., a bacterial or phage display-based system for generating antibodies of a particular species), or by converting an antibody from one species into an antibody from another species by replacing, e.g., the constant region of the antibody with a constant region from the other species, or by replacing one or more amino acid residues of the antibody so that it more closely resembles the sequence of an antibody from the other species. In one embodiment, the antibody is a chimeric antibody comprising amino acid sequences derived from antibodies from two or more different species.

[0208] Antigen binding proteins may be prepared, and screened for desired properties, by any of a number of conventional techniques. Certain of the techniques involve isolating a nucleic acid encoding a polypeptide chain (or portion thereof) of an antigen binding protein of interest (e.g., an anti-PD-L1 antibody), and manipulating the nucleic acid through recombinant DNA technology. The nucleic acid may be fused to another nucleic acid of interest, or altered (e.g., by mutagenesis or other conventional techniques) to add, delete, or substitute one or more amino acid residues, for example. Furthermore, the antigen binding proteins may be purified from cells that naturally express them (e.g., an antibody can be purified from a hybridoma that produces it), or produced in recombinant expression systems, using any technique known in the art. See, for example, Monoclonal Antibodies, Hybridomas: A New Dimension in Biological Analyses, Kennet et al. (eds.), Plenum Press, New York (1980); and Antibodies: A Laboratory Manual, Harlow and Land (eds.), Cold Spring Harbor Laboratory Press, Cold Spring Harbor, N.Y., (1988).

[0209] Any expression system known in the art can be used to make the recombinant polypeptides of the present disclosure. Expression systems are detailed comprehensively above. In general, host cells are transformed with a recombinant expression vector that comprises DNA encoding a desired polypeptide. Among the host cells that may be employed are prokaryotes, yeast or higher eukaryotic cells. Prokaryotes include gram negative or gram positive organisms, for example E. coli or Bacilli. Higher eukaryotic cells include insect cells and established cell lines of mammalian origin. Examples of suitable mammalian host cell lines include the COS-7 line of monkey kidney cells (ATCC CRL1651) (Gluzman et al., 1981, Cell 23:175), L cells, 293 cells, C127 cells, 3T3 cells (ATCC CCL163), Chinese hamster ovary (CHO) cells, HeLa cells, BHK (ATCC CRL10) cell lines, and the CVI/EBNA cell line derived from the African green monkey kidney cell line CVI (ATCC CCL70) as described by McMahan et al., 1991, EMBO J. 10: 2821. Appropriate cloning and expression vectors for use with bacterial, fungal, yeast, and mammalian cellular hosts are described by Pouwels et al. (Cloning Vectors: A Laboratory Manual, Elsevier, New York, 1985).

[0210] It will be appreciated that an antibody of the present disclosure may have at least one amino acid substitution, providing that the antibody retains binding specificity. Therefore, modifications to the antibody structures are encompassed within the scope of the present disclosure. These may include amino acid substitutions, which may be conservative or non-conservative that do not destroy the PD-L1 binding capability of an antibody. Conservative amino acid substitutions may encompass non-naturally occurring amino acid residues, which are typically incorporated by chemical peptide synthesis rather than by synthesis in biological systems. These include peptidomimetics and other reversed or inverted forms of amino acid moieties. A conservative amino acid substitution may also involve a substitution of a native amino acid residue with a normative residue such that there is little or no effect on the polarity or charge of the amino acid residue at that position.

[0211] Non-conservative substitutions may involve the exchange of a member of one class of amino acids or amino acid mimetics for a member from another class with different physical properties (e.g. size, polarity, hydrophobicity, charge). Such substituted residues may be introduced into regions of the human antibody that are homologous with non-human antibodies, or into the non-homologous regions of the molecule.

[0212] Moreover, one skilled in the art may generate test variants containing a single amino acid substitution at each desired amino acid residue. The variants can then be screened using activity assays known to those skilled in the art. Such variants could be used to gather information about suitable variants. For example, if one discovered that a change to a particular amino acid residue resulted in destroyed, undesirably reduced, or unsuitable activity, variants with such a change may be avoided. In other words, based on information gathered from such routine experiments, one skilled in the art can readily determine the amino acids where further substitutions should be avoided either alone or in combination with other mutations.

[0213] A skilled artisan will be able to determine suitable variants of the polypeptide as set forth herein using well-known techniques. In certain embodiments, one skilled in the art may identify suitable areas of the molecule that may be changed without destroying activity by targeting regions not believed to be important for activity. In certain embodiments, one can identify residues and portions of the molecules that are conserved among similar polypeptides. In certain embodiments, even areas that may be important for biological activity or for structure may be subject to conservative amino acid substitutions without destroying the biological activity or without adversely affecting the polypeptide structure.

[0214] Additionally, one skilled in the art can review structure-function studies identifying residues in similar polypeptides that are important for activity or structure. In view of such a comparison, one can predict the importance of amino acid residues in a protein that correspond to amino acid residues which are important for activity or structure in similar proteins. One skilled in the art may opt for chemically similar amino acid substitutions for such predicted important amino acid residues.

[0215] One skilled in the art can also analyze the three-dimensional structure and amino acid sequence in relation to that structure in similar polypeptides. In view of such information, one skilled in the art may predict the alignment of amino acid residues of an antibody with respect to its three dimensional structure. In certain embodiments, one skilled in the art may choose not to make radical changes to amino acid residues predicted to be on the surface of the protein, since such residues may be involved in important interactions with other molecules.

[0216] A number of scientific publications have been devoted to the prediction of secondary structure. See Moult J., Curr. Op. in Biotech., 7(4):422-427 (1996), Chou et al., Biochem., 13(2):222-245 (1974); Chou et al., Biochem., 113(2):211-222 (1974); Chou et al., Adv. Enzymol. Relat. Areas Mol. Biol., 47:45-148 (1978); Chou et al., Ann. Rev. Biochem., 47:251-276 and Chou et al., Biophys. J., 26:367-384 (1979). Moreover, computer programs are currently available to assist with predicting secondary structure. One method of predicting secondary structure is based upon homology modeling. For example, two polypeptides or proteins which have a sequence identity of greater than 30%, or similarity greater than 40% often have similar structural topologies. The recent growth of the protein structural database (PDB) has provided enhanced predictability of secondary structure, including the potential number of folds within a polypeptide's or protein's structure. See Holm et al., Nucl. Acid. Res., 27(1):244-247 (1999). It has been suggested (Brenner et al., Curr. Op. Struct. Biol., 7(3):369-376 (1997)) that there are a limited number of folds in a given polypeptide or protein and that once a critical number of structures have been resolved, structural prediction will become dramatically more accurate.

[0217] Additional methods of predicting secondary structure include “threading” (Jones, D., Curr. Opin. Struct. Biol., 7(3):377-87 (1997); Sippl et al., Structure, 4(1):15-19 (1996)), “profile analysis” (Bowie et al., Science, 253:164-170 (1991); Gribskov et al., Meth. Enzym., 183:146-159 (1990); Gribskov et al., Proc. Nat. Acad. Sci., 84(13):4355-4358 (1987)), and “evolutionary linkage” (See Holm, supra (1999), and Brenner, supra (1997)).

[0218] In certain embodiments, variants of antibodies include glycosylation variants wherein the number and/or type of glycosylation site has been altered compared to the amino acid sequences of a parent polypeptide. In certain embodiments, variants comprise a greater or a lesser number of N-linked glycosylation sites than the native protein. An N-linked glycosylation site is characterized by the sequence: Asn-X-Ser or Asn-X-Thr, wherein the amino acid residue designated as X can be any amino acid residue except proline. The substitution of amino acid residues to create this sequence provides a potential new site for the addition of an N-linked carbohydrate chain. Alternatively, substitutions which eliminate this sequence will remove an existing N-linked carbohydrate chain. Also provided is a rearrangement of N-linked carbohydrate chains wherein one or more N-linked glycosylation sites (typically those that are naturally occurring) are eliminated and one or more new N-linked sites are created. Additional preferred antibody variants include cysteine variants wherein one or more cysteine residues are deleted from or substituted for another amino acid (e.g., serine) as compared to the parent amino acid sequence. Cysteine variants can be useful when antibodies must be refolded into a biologically active conformation such as after the isolation of insoluble inclusion bodies. Cysteine variants generally have fewer cysteine residues than the native protein, and typically have an even number to minimize interactions resulting from unpaired cysteines.

[0219] Desired amino acid substitutions (whether conservative or non-conservative) can be determined by those skilled in the art at the time such substitutions are desired. In certain embodiments, amino acid substitutions can be used to identify important residues of antibodies to PD-L1, or to increase or decrease the affinity of the antibodies to PD-L1 described herein.

[0220] According to certain embodiments, preferred amino acid substitutions are those which: (1) reduce susceptibility to proteolysis, (2) reduce susceptibility to oxidation, (3) alter binding affinity for forming protein complexes, (4) alter binding affinities, and/or (4) confer or modify other physiochemical or functional properties on such polypeptides. According to certain embodiments, single or multiple amino acid substitutions (in certain embodiments, conservative amino acid substitutions) may be made in the naturally-occurring sequence (in certain embodiments, in the portion of the polypeptide outside the domain(s) forming intermolecular contacts). In certain embodiments, a conservative amino acid substitution typically may not substantially change the structural characteristics of the parent sequence (e.g., a replacement amino acid should not tend to break a helix that occurs in the parent sequence, or disrupt other types of secondary structure that characterizes the parent sequence). Examples of art-recognized polypeptide secondary and tertiary structures are described in Proteins, Structures and Molecular Principles (Creighton, Ed., W. H. Freeman and Company, New York (1984)); Introduction to Protein Structure (C. Branden and J. Tooze, eds., Garland Publishing, New York, N.Y. (1991)); and Thornton et al. Nature 354:105 (1991), which are each incorporated herein by reference.

[0221] In certain embodiments, antibodies of the present disclosure may be chemically bonded with polymers, lipids, or other moieties.

[0222] The binding agents may comprise at least one of the CDRs described herein incorporated into a biocompatible framework structure. In one example, the biocompatible framework structure comprises a polypeptide or portion thereof that is sufficient to form a conformationally stable structural support, or framework, or scaffold, which is able to display one or more sequences of amino acids that bind to an antigen (e.g., CDRs, a variable region, etc.) in a localized surface region. Such structures can be a naturally occurring polypeptide or polypeptide “fold” (a structural motif), or can have one or more modifications, such as additions, deletions or substitutions of amino acids, relative to a naturally occurring polypeptide or fold. These scaffolds can be derived from a polypeptide of any species (or of more than one species), such as a human, other mammal, other vertebrate, invertebrate, plant, bacteria or virus.

[0223] Typically the biocompatible framework structures are based on protein scaffolds or skeletons other than immunoglobulin domains. For example, those based on fibronectin, ankyrin, lipocalin, neocarzinostain, cytochrome b, CP1 zinc finger, PST1, coiled coil, LACI-D1, Z domain and tendamistat domains may be used (See e.g., Nygren and Uhlen, 1997, Curr. Opin. in Struct. Biol., 7, 463-469).

[0224] Humanized antibodies can be produced using techniques known to those skilled in the art (Zhang, W., et al., Molecular Immunology. 42(12):1445-1451, 2005; Hwang W. et al., Methods. 36(1):35-42, 2005; Dall'Acqua W F, et al., Methods 36(1):43-60, 2005; and Clark, M., Immunology Today. 21(8):397-402, 2000).

[0225] Additionally, one skilled in the art will recognize that suitable binding agents include portions of these antibodies, such as one or more of CDR1-L1 to 24 with SEQ ID NOS 1001-1024; CDR2-L1 to 24 with SEQ ID NOS 2001-2024; CDR3-L1 to 24 with SEQ ID NOS 3001-3024; CDR1-H1 to 24 with SEQ ID NOS 4001-4024; CDR2-H1 to 24 with SEQ ID NOS 5001-5024; and CDR3-H1 to 24 with SEQ ID NOS 6001-6024, as specifically disclosed herein. At least one of the regions of CDR regions may have at least one amino acid substitution from the sequences provided here, provided that the antibody retains the binding specificity of the non-substituted CDR. The non-CDR portion of the antibody may be a non-protein molecule, wherein the binding agent cross-blocks the binding of an antibody disclosed herein to PD-L1 and/or neutralizes PD-L1. The non-CDR portion of the antibody may be a non-protein molecule in which the antibody exhibits a similar binding pattern to human PD-L1 peptides in a competition binding assay as that exhibited by at least one of antibodies A1-A25, and/or neutralizes PD-L1. The non-CDR portion of the antibody may be composed of amino acids, wherein the antibody is a recombinant binding protein or a synthetic peptide, and the recombinant binding protein cross-blocks the binding of an antibody disclosed herein to PD-L1 and/or neutralizes PD-L1. The non-CDR portion of the antibody may be composed of amino acids, wherein the antibody is a recombinant antibody, and the recombinant antibody exhibits a similar binding pattern to human PD-L1 peptides in the human PD-L1 peptide epitope competition binding assay (described hereinbelow) as that exhibited by at least one of the antibodies A1-A25, and/or neutralizes PD-L1.

[0226] Where an antibody comprises one or more of CDR1-H, CDR2-H, CDR3-H, CDR1-L, CDR2-L and CDR3-L as described above, it may be obtained by expression from a host cell containing DNA coding for these sequences. A DNA coding for each CDR sequence may be determined on the basis of the amino acid sequence of the CDR and synthesized together with any desired antibody variable region framework and constant region DNA sequences using oligonucleotide synthesis techniques, site-directed mutagenesis and polymerase chain reaction (PCR) techniques as appropriate. DNA coding for variable region frameworks and constant regions is widely available to those skilled in the art from genetic sequences databases such as GenBank®.

[0227] Once synthesized, the DNA encoding an antibody of the present disclosure or fragment thereof may be propagated and expressed according to any of a variety of well-known procedures for nucleic acid excision, ligation, transformation, and transfection using any number of known expression vectors. Thus, in certain embodiments expression of an antibody fragment may be preferred in a prokaryotic host, such as Escherichia coli (see, e.g., Pluckthun et al., 1989 Methods Enzymol. 178:497-515). In certain other embodiments, expression of the antibody or a fragment thereof may be preferred in a eukaryotic host cell, including yeast (e.g., Saccharomyces cerevisiae, Schizosaccharomyces pombe, and Pichia pastoris), animal cells (including mammalian cells) or plant cells. Examples of suitable animal cells include, but are not limited to, myeloma (such as a mouse NSO line), COS, CHO, or hybridoma cells. Examples of plant cells include tobacco, corn, soybean, and rice cells.

[0228] One or more replicable expression vectors containing DNA encoding an antibody variable and/or constant region may be prepared and used to transform an appropriate cell line, for example, a non-producing myeloma cell line, such as a mouse NSO line or a bacteria, such as E. coli, in which production of the antibody will occur. In order to obtain efficient transcription and translation, the DNA sequence in each vector should include appropriate regulatory sequences, particularly a promoter and leader sequence operatively linked to the variable domain sequence. Particular methods for producing antibodies in this way are generally well-known and routinely used. For example, basic molecular biology procedures are described by Maniatis et al. (Molecular Cloning, A Laboratory Manual, 2nd ed., Cold Spring Harbor Laboratory, New York, 1989; see also Maniatis et al, 3rd ed., Cold Spring Harbor Laboratory, New York, (2001)). DNA sequencing can be performed as described in Sanger et al. (PNAS 74:5463, (1977)) and the Amersham International plc sequencing handbook, and site directed mutagenesis can be carried out according to methods known in the art (Kramer et al., Nucleic Acids Res. 12:9441, (1984); Kunkel Proc. Natl. Acad. Sci. USA 82:488-92 (1985); Kunkel et al., Methods in Enzymol. 154:367-82 (1987); the Anglian Biotechnology Ltd. handbook). Additionally, numerous publications describe techniques suitable for the preparation of antibodies by manipulation of DNA, creation of expression vectors, and transformation and culture of appropriate cells (Mountain A and Adair, J R in Biotechnology and Genetic Engineering Reviews (ed. Tombs, M P, 10, Chapter 1, 1992, Intercept, Andover, UK); “Current Protocols in Molecular Biology”, 1999, F. M. Ausubel (ed.), Wiley Interscience, New York).

[0229] Where it is desired to improve the affinity of antibodies according to the disclosure containing one or more of the above-mentioned CDRs can be obtained by a number of affinity maturation protocols including maintaining the CDRs (Yang et al., J. Mol. Biol., 254, 392-403, 1995), chain shuffling (Marks et al., Bio/Technology, 10, 779-783, 1992), use of mutation strains of E. coli. (Low et al., J. Mol. Biol., 250, 350-368, 1996), DNA shuffling (Patten et al., Curr. Opin. Biotechnol., 8, 724-733, 1997), phage display (Thompson et al., J. Mol. Biol., 256, 7-88, 1996) and sexual PCR (Crameri, et al., Nature, 391, 288-291, 1998). All of these methods of affinity maturation are discussed by Vaughan et al. (Nature Biotech., 16, 535-539, 1998).

[0230] It will be understood by one skilled in the art that some proteins, such as antibodies, may undergo a variety of posttranslational modifications. The type and extent of these modifications often depends on the host cell line used to express the protein as well as the culture conditions. Such modifications may include variations in glycosylation, methionine oxidation, diketopiperizine formation, aspartate isomerization and asparagine deamidation. A frequent modification is the loss of a carboxy-terminal basic residue (such as lysine or arginine) due to the action of carboxypeptidases (as described in Harris, R. J. Journal of Chromatography 705:129-134, 1995).

[0231] 7.9. Sequences

[0232] Antibodies A1-A25 comprise heavy and light chain V(J)D polynucleotides (also referred to herein as L1-L25 and H1-H25, respectively). Antibodies A1-A25 comprise the sequences listed in TABLE 5. For example, antibody A1 comprises light chain L1 (SEQ ID NO:1) and heavy chain H1 (SEQ ID NO:101). CDR sequences in the light chain (L1-L25) and heavy chain (H1-H25) are also provided with a specific SEQ ID NOs. For example, three CDR sequences (CDR1, CDR 2 and CDR3) for L1 are CDR1-L1 (SEQ ID NO:1001), CDR2-L1 (SEQ ID NO:2001) and CDR3-L1 (SEQ ID NO:3001), respectively and three CDR sequences (CDR1, CDR 2 and CDR3) for H1 are CDR1-H1 (SEQ ID NO:4001), CDR2-H1 (SEQ ID NO:5001) and CDR3-H1 (SEQ ID NO:6001).

TABLE 5

| Antibodies | Light Chain | Heavy Chain |
|---|---|---|
| A1 | L1 (SEQ ID NO: 1) | H1 (SEQ ID NO: 101) |
| | L1 comprises CDR1-L1 (SEQ ID NO: 1001), | H1 comprises CDR1-H1 (SEQ ID NO: 4001), |
| | CDR2-L1 (SEQ ID NO: 2001) and CDR3-L1 | CDR2-H1 (SEQ ID NO: 5001) and CDR3-H1 |
| | (SEQ ID NO: 3001) | (SEQ ID NO: 6001) |
| A2 | L2 (SEQ ID NO: 2) | H2 (SEQ ID NO: 102) |
| | L2 comprises CDR1-L2 (SEQ ID NO: 1002), | He comprises CDR1-H2 (SEQ ID NO: 4002), |
| | CDR2-L2 (SEQ ID NO: 2002) and CDR3-L2 | CDR2-H2 (SEQ ID NO: 5002) and CDR3-H2 |
| | (SEQ ID NO: 3002) | (SEQ ID NO: 6002) |
| A3 | L3 (SEQ ID NO: 3) | H3 (SEQ ID NO: 103) |
| | L3 comprises CDR1-L3 (SEQ ID NO: 1003), | H3 comprises CDR1-H3 (SEQ ID NO: 4003), |
| | CDR2-L3 (SEQ ID NO: 2003) and CDR3-L3 | CDR2-H3 (SEQ ID NO: 5003) and CDR3-H3 |
| | (SEQ ID NO: 3003) | (SEQ ID NO: 6003) |
| A4 | L4 (SEQ ID NO: 4) | H4 (SEQ ID NO: 104) |
| | L4 comprises CDR1-L4 (SEQ ID NO: 1004), | H4 comprises CDR1-H4 (SEQ ID NO: 4004), |
| | CDR2-L4 (SEQ ID NO: 2004) and CDR3-L4 | CDR2-H4 (SEQ ID NO: 5004) and CDR3-H4 |
| | (SEQ ID NO: 3004) | (SEQ ID NO: 6004) |
| A5 | L5 (SEQ ID NO: 5) | H5 (SEQ ID NO: 105) |
| | L5 comprises CDR1-L5 (SEQ ID NO: 1005), | H4 comprises CDR1-H5 (SEQ ID NO: 4005), |
| | CDR2-L5 (SEQ ID NO: 2005) and CDR3-L5 | CDR2-H5 (SEQ ID NO: 5005) and CDR3-H5 |
| | (SEQ ID NO: 3005) | (SEQ ID NO: 6005) |
| A6 | L6 (SEQ ID NO: 6) | H6 (SEQ ID NO: 106) |
| | L6 comprises CDR1-L6 (SEQ ID NO: 1006), | H6 comprises CDR1-H6 (SEQ ID NO: 4006), |
| | CDR2-L6 (SEQ ID NO: 2006) and CDR3-L6 | CDR2-H6 (SEQ ID NO: 5006) and CDR3-H6 |
| | (SEQ ID NO: 3006) | (SEQ ID NO: 6006) |
| A7 | L7 (SEQ ID NO: 7) | H7 (SEQ ID NO: 107) |
| | L7 comprises CDR1-L7 (SEQ ID NO: 1007), | H7 comprises CDR1-H7 (SEQ ID NO: 4007), |
| | CDR2-L7 (SEQ ID NO: 2007) and CDR3-L7 | CDR2-H7 (SEQ ID NO: 5007) and CDR3-H7 |
| | (SEQ ID NO: 3007) | (SEQ ID NO: 6007) |
| A8 | L8 (SEQ ID NO: 8) | H8 (SEQ ID NO: 108) |
| | L8 comprises CDR1-L8 (SEQ ID NO: 1008), | H8 comprises CDR1-H8 (SEQ ID NO: 4008), |
| | CDR2-L8 (SEQ ID NO: 2008) and CDR3-L8 | CDR2-H8 (SEQ ID NO: 5008) and CDR3-H8 |
| | (SEQ ID NO: 3008) | (SEQ ID NO: 6008) |
| A9 | L9 (SEQ ID NO: 9) | H9 (SEQ ID NO: 109) |
| | L9 comprises CDR1-L9 (SEQ ID NO: 1009), | H9 comprises CDR1-H9 (SEQ ID NO: 4009), |
| | CDR2-L9 (SEQ ID NO: 2009) and CDR3-L9 | CDR2-H9 (SEQ ID NO: 5009) and CDR3-H9 |
| | (SEQ ID NO: 3009) | (SEQ ID NO: 6009) |
| A10 | L10 (SEQ ID NO: 10) | H10 (SEQ ID NO: 110) |
| | L10 comprises CDR1-L10 (SEQ ID NO: 1010), | H10 comprises CDR1-H10 (SEQ ID |
| | CDR2-L10 (SEQ ID NO: 2010) and CDR3-L10 | NO: 4010), CDR2-H10 (SEQ ID NO: 5010) and |
| | (SEQ ID NO: 3010) | CDR3-H10 (SEQ ID NO: 6010) |
| A11 | L11 (SEQ ID NO: 11) | H11 (SEQ ID NO: 111) |
| | L11 comprises CDR1-L11 (SEQ ID NO: 1011), | H11 comprises CDR1-H11 (SEQ ID |
| | CDR2-L11 (SEQ ID NO: 2011) and CDR3-L11 | NO: 4011), CDR2-H11 (SEQ ID NO: 5011) and |
| | (SEQ ID NO: 3011) | CDR3-H11 (SEQ ID NO: 6011) |
| A12 | L12 (SEQ ID NO: 12) | H12 (SEQ ID NO: 112) |
| | L12 comprises CDR1-L12 (SEQ ID NO: 1012), | H12 comprises CDR1-H12 (SEQ ID |
| | CDR2-L12 (SEQ ID NO: 2012) and CDR3-L12 | NO: 4012), CDR2-H12 (SEQ ID NO: 5012) and |
| | (SEQ ID NO: 3012) | CDR3-H12 (SEQ ID NO: 6012) |
| A13 | L13 (SEQ ID NO: 13) | H13 (SEQ ID NO: 113) |
| | L13 comprises CDR1-L13 (SEQ ID NO: 1013), | H13 comprises CDR1-H13 (SEQ ID |
| | CDR2-L13 (SEQ ID NO: 2013) and CDR3-L13 | NO: 4013), CDR2-H13 (SEQ ID NO: 5013) and |
| | (SEQ ID NO: 3013) | CDR3-H13 (SEQ ID NO: 6013) |
| A14 | L14 (SEQ ID NO: 14) | H14 (SEQ ID NO: 114) |
| | L14 comprises CDR1-L14 (SEQ ID NO: 1014), | H14 comprises CDR1-H14 (SEQ ID |
| | CDR2-L14 (SEQ ID NO: 2014) and CDR3-L14 | NO: 4014), CDR2-H14 (SEQ ID NO: 5014) and |
| | (SEQ ID NO: 3014) | CDR3-H14 (SEQ ID NO: 6014) |
| A15 | L15 (SEQ ID NO: 15) | H15 (SEQ ID NO: 115) |
| | L15 comprises CDR1-L15 (SEQ ID NO: 1015), | H15 comprises CDR1-H15 (SEQ ID |
| | CDR2-L15 (SEQ ID NO: 2015) and CDR3-L15 | NO: 4015), CDR2-H15 (SEQ ID NO: 5015) and |
| | (SEQ ID NO: 3015) | CDR3-H15 (SEQ ID NO: 6015) |
| A16 | L16 (SEQ ID NO: 16) | H16 (SEQ ID NO: 116) |
| | L16 comprises CDR1-L16 (SEQ ID NO: 1016), | H16 comprises CDR1-H16 (SEQ ID |
| | CDR2-L16 (SEQ ID NO: 2016) and CDR3-L16 | NO: 4016), CDR2-H16 (SEQ ID NO: 5016) and |
| | (SEQ ID NO: 3016) | CDR3-H16 (SEQ ID NO: 6016) |
| A17 | L17 (SEQ ID NO: 17) | H17 (SEQ ID NO: 117) |
| | L17 comprises CDR1-L17 (SEQ ID NO: 1017), | H17 comprises CDR1-H17 (SEQ ID |
| | CDR2-L17 (SEQ ID NO: 2017) and CDR3-L17 | NO: 4017), CDR2-H17 (SEQ ID NO: 5017) and |
| | (SEQ ID NO: 3017) | CDR3-H17 (SEQ ID NO: 6017) |
| A18 | L18 (SEQ ID NO: 18) | H18 (SEQ ID NO: 118) |
| | L18 comprises CDR1-L18 (SEQ ID NO: 1018), | H18 comprises CDR1-H18 (SEQ ID |
| | CDR2-L18 (SEQ ID NO: 2018) and CDR3-L18 | NO: 4018), CDR2-H18 (SEQ ID NO: 5018) and |
| | (SEQ ID NO: 3018) | CDR3-H18 (SEQ ID NO: 6018) |
| A19 | L19 (SEQ ID NO: 19) | H19 (SEQ ID NO: 119) |
| | L19 comprises CDR1-L19 (SEQ ID NO: 1019), | H19 comprises CDR1-H19 (SEQ ID |
| | CDR2-L19 (SEQ ID NO: 2019) and CDR3-L19 | NO: 4019), CDR2-H19 (SEQ ID NO: 5019) and |
| | (SEQ ID NO: 3019) | CDR3-H19 (SEQ ID NO: 6019) |
| A20 | L20 (SEQ ID NO: 20) | H20 (SEQ ID NO: 120) |
| | L20 comprises CDR1-L20 (SEQ ID NO: 1020), | H20 comprises CDR1-H20 (SEQ ID |
| | CDR2-L20 (SEQ ID NO: 2020) and CDR3-L20 | NO: 4020), CDR2-H20 (SEQ ID NO: 5020) and |
| | (SEQ ID NO: 3020) | CDR3-H20 (SEQ ID NO: 6020) |
| A21 | L21 (SEQ ID NO: 21) | H21 (SEQ ID NO: 121) |
| | L21 comprises CDR1-L21 (SEQ ID NO: 1021), | H21 comprises CDR1-H21 (SEQ ID |
| | CDR2-L21 (SEQ ID NO: 2021) and CDR3-L21 | NO: 4021), CDR2-H21 (SEQ ID NO: 5021) and |
| | (SEQ ID NO: 3021) | CDR3-H21 (SEQ ID NO: 6021) |
| A22 | L22 (SEQ ID NO: 22) | H22 (SEQ ID NO: 122) |
| | L22 comprises CDR1-L22 (SEQ ID NO: 1022), | H22 comprises CDR1-H22 (SEQ ID |
| | CDR2-L22 (SEQ ID NO: 2022) and CDR3-L22 | NO: 4022), CDR2-H22 (SEQ ID NO: 5022) and |
| | (SEQ ID NO: 3022) | CDR3-H22 (SEQ ID NO: 6022) |
| A23 | L23 (SEQ ID NO: 23) | H23 (SEQ ID NO: 123) |
| | L23 comprises CDR1-L23 (SEQ ID NO: 1023), | H23 comprises CDR1-H23 (SEQ ID |
| | CDR2-L23 (SEQ ID NO: 2023) and CDR3-L23 | NO: 4023), CDR2-H23 (SEQ ID NO: 5023) and |
| | (SEQ ID NO: 3023) | CDR3-H23 (SEQ ID NO: 6023) |
| A24 | L24 (SEQ ID NO: 24) | H24 (SEQ ID NO: 124) |
| | L24 comprises CDR1-L24 (SEQ ID NO: 1024), | H24 comprises CDR1-H24 (SEQ ID |
| | CDR2-L24 (SEQ ID NO: 2024) and CDR3-L24 | NO: 4024), CDR2-H24 (SEQ ID NO: 5024) and |
| | (SEQ ID NO: 3024) | CDR3-H24 (SEQ ID NO: 6024) |
| A25 | L25 (SEQ ID NO: 25) | H25 (SEQ ID NO: 125) |
| | L25 comprises CDR1-L25 (SEQ ID NO: 1025), | H25 comprises CDR1-H25 (SEQ ID |
| | CDR2-L25 (SEQ ID NO: 2025) and CDR3-L25 | NO: 4025), CDR2-H25 (SEQ ID NO: 5025) and |
| | (SEQ ID NO: 3025) | CDR3-H25 (SEQ ID NO: 6025) |

[0233] 7.10. Pharmaceutical Compositions

[0234] Pharmaceutical compositions containing the proteins and polypeptides of the present disclosure are also provided. Such compositions comprise a therapeutically or prophylactically effective amount of the polypeptide or protein in a mixture with pharmaceutically acceptable materials, and physiologically acceptable formulation materials.

[0235] The pharmaceutical composition may contain formulation materials for modifying, maintaining or preserving, for example, the pH, osmolarity, viscosity, clarity, color, isotonicity, odor, sterility, stability, rate of dissolution or release, adsorption or penetration of the composition.

[0236] Suitable formulation materials include, but are not limited to, amino acids (such as glycine, glutamine, asparagine, arginine or lysine); antimicrobials; antioxidants (such as ascorbic acid, sodium sulfite or sodium hydrogen-sulfite); buffers (such as borate, bicarbonate, Tris-HCl, citrates, phosphates, other organic acids); bulking agents (such as mannitol or glycine), chelating agents (such as ethylenediamine tetraacetic acid (EDTA)); complexing agents (such as caffeine, polyvinylpyrrolidone, beta-cyclodextrin or hydroxypropyl-beta-cyclodextrin); fillers; monosaccharides; disaccharides and other carbohydrates (such as glucose, mannose, or dextrins); proteins (such as serum albumin, gelatin or immunoglobulins); coloring; flavoring and diluting agents; emulsifying agents; hydrophilic polymers (such as polyvinylpyrrolidone); low molecular weight polypeptides; salt-forming counterions (such as sodium); preservatives (such as benzalkonium chloride, benzoic acid, salicylic acid, thimerosal, phenethyl alcohol, methylparaben, propylparaben, chlorhexidine, sorbic acid or hydrogen peroxide); solvents (such as glycerin, propylene glycol or polyethylene glycol); sugar alcohols (such as mannitol or sorbitol); suspending agents; surfactants or wetting agents (such as pluronics, PEG, sorbitan esters, polysorbates such as polysorbate 20, polysorbate 80, triton, tromethamine, lecithin, cholesterol, tyloxapal); stability enhancing agents (sucrose or sorbitol); tonicity enhancing agents (such as alkali metal halides (preferably sodium or potassium chloride, mannitol sorbitol); delivery vehicles; diluents; excipients and/or pharmaceutical adjuvants. Neutral buffered saline or saline mixed with conspecific serum albumin are examples of appropriate diluents. In accordance with appropriate industry standards, preservatives such as benzyl alcohol may also be added. The composition may be formulated as a lyophilizate using appropriate excipient solutions (e.g., sucrose) as diluents. Suitable components are nontoxic to recipients at the dosages and concentrations employed. Further examples of components that may be employed in pharmaceutical formulations are presented in Remington's Pharmaceutical Sciences, 16^{th} Ed. (1980) and 20^{th} Ed. (2000), Mack Publishing Company, Easton, Pa.

[0237] Optionally, the composition additionally comprises one or more physiologically active agents, for example, an anti-angiogenic substance, a chemotherapeutic substance (such as capecitabine, 5-fluorouracil, or doxorubicin), an analgesic substance, etc., non-exclusive examples of which are provided herein. In various particular embodiments, the composition comprises one, two, three, four, five, or six physiologically active agents in addition to a PD-L1-binding protein.

[0238] In another embodiment of the present disclosure, the compositions disclosed herein may be formulated in a neutral or salt form. Illustrative pharmaceutically-acceptable salts include the acid addition salts (formed with the free amino groups of the protein) and which are formed with inorganic acids such as, for example, hydrochloric or phosphoric acids, or such organic acids as acetic, oxalic, tartaric, mandelic, and the like. Salts formed with the free carboxyl groups can also be derived from inorganic bases such as, for example, sodium, potassium, ammonium, calcium, or ferric hydroxides, and such organic bases as isopropylamine, trimethylamine, histidine, procaine and the like. Upon formulation, solutions will be administered in a manner compatible with the dosage formulation and in such amount as is therapeutically effective.

[0239] The carriers can further comprise any and all solvents, dispersion media, vehicles, coatings, diluents, antibacterial and antifungal agents, isotonic and absorption delaying agents, buffers, carrier solutions, suspensions, colloids, and the like. The use of such media and agents for pharmaceutical active substances is well known in the art. Except insofar as any conventional media or agent is incompatible with the active ingredient, its use in the therapeutic compositions is contemplated. Supplementary active ingredients can also be incorporated into the compositions. The phrase “pharmaceutically-acceptable” refers to molecular entities and compositions that do not produce an allergic or similar untoward reaction when administered to a human.

[0240] The optimal pharmaceutical composition will be determined by one skilled in the art depending upon, for example, the intended route of administration, delivery format, and desired dosage. See for example, Remington's Pharmaceutical Sciences, supra. Such compositions may influence the physical state, stability, rate of in vivo release, and rate of in vivo clearance of the polypeptide. For example, suitable compositions may be water for injection, physiological saline solution for parenteral administration.

[0241] 7.10.1. Content of Pharmaceutically Active Ingredient

[0242] In typical embodiments, the active ingredient (i.e., the proteins and polypeptides of the present disclosure) is present in the pharmaceutical composition at a concentration of at least 0.01 mg/ml, at least 0.1 mg/ml, at least 0.5 mg/ml, or at least 1 mg/ml. In certain embodiments, the active ingredient is present in the pharmaceutical composition at a concentration of at least 1 mg/ml, 2 mg/ml, 3 mg/ml, 4 mg/ml, 5 mg/ml, 10 mg/ml, 15 mg/ml, 20 mg/ml, or 25 mg/ml. In certain embodiments, the active ingredient is present in the pharmaceutical composition at a concentration of at least 30 mg/ml, 35 mg/ml, 40 mg/ml, 45 mg/ml or 50 mg/ml.

[0243] In some embodiments, the pharmaceutical composition comprises one or more additional active ingredients in addition to the proteins or polypeptides of the present disclosure. The one or more additional active ingredients can be a drug targeting a different check point receptor, such as PD-1 inhibitor (e.g., anti-PD-1 antibody) or TIGIT inhibitor (e.g., anti-TIGIT antibody).

[0244] 7.10.2. Formulation Generally

[0245] The pharmaceutical composition can be in any form appropriate for human or veterinary medicine, including a liquid, an oil, an emulsion, a gel, a colloid, an aerosol or a solid.

[0246] The pharmaceutical composition can be formulated for administration by any route of administration appropriate for human or veterinary medicine, including enteral and parenteral routes of administration.

[0247] In various embodiments, the pharmaceutical composition is formulated for administration by inhalation. In certain of these embodiments, the pharmaceutical composition is formulated for administration by a vaporizer. In certain of these embodiments, the pharmaceutical composition is formulated for administration by a nebulizer. In certain of these embodiments, the pharmaceutical composition is formulated for administration by an aerosolizer.

[0248] In various embodiments, the pharmaceutical composition is formulated for oral administration, for buccal administration, or for sublingual administration.

[0249] In some embodiments, the pharmaceutical composition is formulated for intravenous, intramuscular, or subcutaneous administration.

[0250] In some embodiments, the pharmaceutical composition is formulated for intrathecal or intracerebroventricular administration.

[0251] In some embodiments, the pharmaceutical composition is formulated for topical administration.

[0252] 7.10.3. Pharmacological Compositions Adapted for Injection

[0253] For intravenous, cutaneous or subcutaneous injection, or injection at the site of affliction, the active ingredient will be in the form of a parenterally acceptable aqueous solution which is pyrogen-free and has suitable pH, isotonicity and stability. Those of relevant skill in the art are well able to prepare suitable solutions using, for example, isotonic vehicles such as Sodium Chloride Injection, Ringer's Injection, Lactated Ringer's Injection. Preservatives, stabilisers, buffers, antioxidants and/or other additives can be included, as required.

[0254] In various embodiments, the unit dosage form is a vial, ampule, bottle, or pre-filled syringe. In some embodiments, the unit dosage form contains 0.01 mg, 0.1 mg, 0.5 mg, 1 mg, 2.5 mg, 5 mg, 10 mg, 12.5 mg, 25 mg, 50 mg, 75 mg, or 100 mg of the pharmaceutical composition. In some embodiments, the unit dosage form contains 125 mg, 150 mg, 175 mg, or 200 mg of the pharmaceutical composition. In some embodiments, the unit dosage form contains 250 mg of the pharmaceutical composition.

[0255] In typical embodiments, the pharmaceutical composition in the unit dosage form is in liquid form. In various embodiments, the unit dosage form contains between 0.1 mL and 50 ml of the pharmaceutical composition. In some embodiments, the unit dosage form contains 1 ml, 2.5 ml, 5 ml, 7.5 ml, 10 ml, 25 ml, or 50 ml of pharmaceutical composition.

[0256] In particular embodiments, the unit dosage form is a vial containing 1 ml of the pharmaceutical composition at a concentration of 0.01 mg/ml, 0.1 mg/ml, 0.5 mg/ml, or 1 mg/ml. In some embodiments, the unit dosage form is a vial containing 2 ml of the pharmaceutical composition at a concentration of 0.01 mg/ml, 0.1 mg/ml, 0.5 mg/ml, or 1 mg/ml.

[0257] In some embodiments, the pharmaceutical composition in the unit dosage form is in solid form, such as a lyophilate, suitable for solubilization.

[0258] Unit dosage form embodiments suitable for subcutaneous, intradermal, or intramuscular administration include preloaded syringes, auto-injectors, and autoinject pens, each containing a predetermined amount of the pharmaceutical composition described hereinabove.

[0259] In various embodiments, the unit dosage form is a preloaded syringe, comprising a syringe and a predetermined amount of the pharmaceutical composition. In certain preloaded syringe embodiments, the syringe is adapted for subcutaneous administration. In certain embodiments, the syringe is suitable for self-administration. In particular embodiments, the preloaded syringe is a single use syringe.

[0260] In various embodiments, the preloaded syringe contains about 0.1 mL to about 0.5 mL of the pharmaceutical composition. In certain embodiments, the syringe contains about 0.5 mL of the pharmaceutical composition. In specific embodiments, the syringe contains about 1.0 mL of the pharmaceutical composition. In particular embodiments, the syringe contains about 2.0 mL of the pharmaceutical composition.

[0261] In certain embodiments, the unit dosage form is an autoinject pen. The autoinject pen comprises an autoinject pen containing a pharmaceutical composition as described herein. In some embodiments, the autoinject pen delivers a predetermined volume of pharmaceutical composition. In other embodiments, the autoinject pen is configured to deliver a volume of pharmaceutical composition set by the user.

[0262] In various embodiments, the autoinject pen contains about 0.1 mL to about 5.0 mL of the pharmaceutical composition. In specific embodiments, the autoinject pen contains about 0.5 mL of the pharmaceutical composition. In particular embodiments, the autoinject pen contains about 1.0 mL of the pharmaceutical composition. In other embodiments, the autoinject pen contains about 5.0 mL of the pharmaceutical composition.

[0263] 7.11. Unit Dosage Forms

[0264] The pharmaceutical compositions may conveniently be presented in unit dosage form.

[0265] The unit dosage form will typically be adapted to one or more specific routes of administration of the pharmaceutical composition.

[0266] In various embodiments, the unit dosage form is adapted for administration by inhalation. In certain of these embodiments, the unit dosage form is adapted for administration by a vaporizer. In certain of these embodiments, the unit dosage form is adapted for administration by a nebulizer. In certain of these embodiments, the unit dosage form is adapted for administration by an aerosolizer.

[0267] In various embodiments, the unit dosage form is adapted for oral administration, for buccal administration, or for sublingual administration.

[0268] In some embodiments, the unit dosage form is adapted for intravenous, intramuscular, or subcutaneous administration.

[0269] In some embodiments, the unit dosage form is adapted for intrathecal or intracerebroventricular administration.

[0270] In some embodiments, the pharmaceutical composition is formulated for topical administration.

[0271] The amount of active ingredient which can be combined with a carrier material to produce a single dosage form will generally be that amount of the compound which produces a therapeutic effect.

[0272] 7.12. Methods of Use

[0273] Therapeutic antibodies may be used that specifically bind to intact PD-L1.

[0274] In vivo and/or in vitro assays may optionally be employed to help identify optimal dosage ranges. The precise dose to be employed in the formulation will also depend on the route of administration, and the seriousness of the condition, and should be decided according to the judgment of the practitioner and each subject's circumstances. Effective doses may be extrapolated from dose-response curves derived from in vitro or animal model test systems.

[0275] An oligopeptide or polypeptide is within the scope of the present disclosure if it has an amino acid sequence that is at least 75%, 76%, 77%, 78%, 79%, 80%, 81%, 82%, 83%, 84%, 85%, 86%, 87%, 88%, 89%, 90%, 91%, 92%, 93%, 94%, 95%, 96%, 97%, 98% or 99% identical to least one of the CDRs provided herein; and/or to a CDR of a PD-L1 binding agent that cross-blocks the binding of at least one of antibodies A1-A25 to PD-L1, and/or is cross-blocked from binding to PD-L1 by at least one of antibodies A1-A25; and/or to a CDR of a PD-L1 binding agent wherein the binding agent can block the binding of PD-L1 to its ligands.

[0276] PD-L1 binding agent polypeptides and antibodies are within the scope of the present disclosure if they have amino acid sequences that are at least 85%, 86%, 87%, 88%, 89%, 90%, 91%, 92%, 93%, 94%, 95%, 96%, 97%, 98% or 99% identical to a variable region of at least one of antibodies A1-A25, and cross-block the binding of at least one of antibodies A1-A25 to PD-L1, and/or are cross-blocked from binding to PD-L1 by at least one of antibodies A1-A25; and/or can block the inhibitory effect of PD-L1 on its ligands.

[0277] Antibodies according to the disclosure may have a binding affinity for human PD-L1 of less than or equal to 5×10⁻⁷M, less than or equal to 1×10⁻⁷M, less than or equal to 0.5×10⁻⁷M, less than or equal to 1×10⁻⁸M, less than or equal to 1×10⁻⁹M, less than or equal to 1×10⁻¹⁰M, less than or equal to 1×10⁻¹¹M, or less than or equal to 1×10⁻¹²M.

[0278] The affinity of an antibody or binding partner, as well as the extent to which an antibody inhibits binding, can be determined by one of ordinary skill in the art using conventional techniques, for example those described by Scatchard et al. (Ann. N.Y. Acad. Sci. 51:660-672 (1949)) or by surface plasmon resonance (SPR; BIAcore, Biosensor, Piscataway, N.J.). For surface plasmon resonance, target molecules are immobilized on a solid phase and exposed to ligands in a mobile phase running along a flow cell. If ligand binding to the immobilized target occurs, the local refractive index changes, leading to a change in SPR angle, which can be monitored in real time by detecting changes in the intensity of the reflected light. The rates of change of the SPR signal can be analyzed to yield apparent rate constants for the association and dissociation phases of the binding reaction. The ratio of these values gives the apparent equilibrium constant (affinity) (see, e.g., Wolff et al., Cancer Res. 53:2560-65 (1993)).

[0279] An antibody according to the present disclosure may belong to any immunoglobin class, for example IgG, IgE, IgM, IgD, or IgA. It may be obtained from or derived from an animal, for example, fowl (e.g., chicken) and mammals, which includes but is not limited to a mouse, rat, hamster, rabbit, or other rodent, cow, horse, sheep, goat, camel, human, or other primate. The antibody may be an internalizing antibody. Production of antibodies is disclosed generally in U.S. Patent Publication No. 2004/0146888 A1.

[0280] In the methods described above to generate antibodies according to the disclosure, including the manipulation of the specific A1-A25 CDRs into new frameworks and/or constant regions, appropriate assays are available to select the desired antibodies (i.e. assays for determining binding affinity to PD-L1; cross-blocking assays; Biacore-based competition binding assay;” in vivo assays).

[0281] 7.12.1. Methods of Treating a Disease Responsive to a PD-L1 Inhibitor or Activator

[0282] In another aspect, methods are presented for treating a subject having a disease responsive to a PD-L1 inhibitor or activator. The disease can be cancer, autoimmune disease, or viral or bacterial infection.

[0283] The terms “treatment,” “treating,” and the like are used herein to generally mean obtaining a desired pharmacologic and/or physiologic effect. The effect may be prophylactic, in terms of completely or partially preventing a disease, condition, or symptoms thereof, and/or may be therapeutic in terms of a partial or complete cure for a disease or condition and/or adverse effect, such as a symptom, attributable to the disease or condition. “Treatment” as used herein covers any treatment of a disease or condition of a mammal, particularly a human, and includes: (a) preventing the disease or condition from occurring in a subject which may be predisposed to the disease or condition but has not yet been diagnosed as having it; (b) inhibiting the disease or condition (e.g., arresting its development); or (c) relieving the disease or condition (e.g., causing regression of the disease or condition, providing improvement in one or more symptoms). Improvements in any conditions can be readily assessed according to standard methods and techniques known in the art. The population of subjects treated by the method of the disease includes subjects suffering from the undesirable condition or disease, as well as subjects at risk for development of the condition or disease.

[0284] By the term “therapeutically effective dose” or “effective amount” is meant a dose or amount that produces the desired effect for which it is administered. The exact dose or amount will depend on the purpose of the treatment, and will be ascertainable by one skilled in the art using known techniques (see, e.g., Lloyd (1999) The Art, Science and Technology of Pharmaceutical Compounding).

[0285] The term “sufficient amount” means an amount sufficient to produce a desired effect.

[0286] The term “therapeutically effective amount” is an amount that is effective to ameliorate a symptom of a disease. A therapeutically effective amount can be a “prophylactically effective amount” as prophylaxis can be considered therapy.

[0287] The term “ameliorating” refers to any therapeutically beneficial result in the treatment of a disease state, e.g., a neurodegenerative disease state, including prophylaxis, lessening in the severity or progression, remission, or cure thereof.

[0288] The actual amount administered, and rate and time-course of administration, will depend on the nature and severity of protein aggregation disease being treated. Prescription of treatment, e.g. decisions on dosage etc., is within the responsibility of general practitioners and other medical doctors, and typically takes account of the disorder to be treated, the condition of the individual patient, the site of delivery, the method of administration and other factors known to practitioners. Examples of the techniques and protocols mentioned above can be found in Remington's Pharmaceutical Sciences, 16th edition, Osol, A. (ed), 1980.

[0289] In some embodiments, the pharmaceutical composition is administered by inhalation, orally, by buccal administration, by sublingual administration, by injection or by topical application.

[0290] In some embodiments, the pharmaceutical composition is administered in an amount sufficient to modulate survival of neurons or dopamine release. In some embodiments, the major cannabinoid is administered in an amount less than 1 g, less than 500 mg, less than 100 mg, less than 10 mg per dose.

[0291] In some embodiments, the pharmaceutical composition is administered once a day, 2-4 times a day, 2-4 times a week, once a week, or once every two weeks.

[0292] A composition can be administered alone or in combination with other treatments, either simultaneously or sequentially dependent upon the condition to be treated. For example, the pharmaceutical composition can be administered in combination with one or more drugs targeting a different check point receptor, such as PD-1 inhibitor (e.g., anti-PD-1 antibody) or TIGIT inhibitor (e.g., anti-TIGIT antibody).

### 8. EXAMPLES

[0293] Below are examples of specific embodiments for carrying out the present disclosure. The examples are offered for illustrative purposes only, and are not intended to limit the scope of the present disclosure in any way. Efforts have been made to ensure accuracy with respect to numbers used (e.g., amounts, temperatures, etc.), but some experimental error and deviation should, of course, be allowed for.

[0294] The practice of the present disclosure will employ, unless otherwise indicated, conventional methods of protein chemistry, biochemistry, recombinant DNA techniques and pharmacology, within the skill of the art. Such techniques are explained fully in the literature. See, e.g., T. E. Creighton, Proteins: Structures and Molecular Properties (W.H. Freeman and Company, 1993); A. L. Lehninger, Biochemistry (Worth Publishers, Inc., current addition); Sambrook, et al., Molecular Cloning: A Laboratory Manual (2nd Edition, 1989); Methods In Enzymology (S. Colowick and N. Kaplan eds., Academic Press, Inc.); Remington's Pharmaceutical Sciences, 18th Edition (Easton, Pa.: Mack Publishing Company, 1990); Carey and Sundberg Advanced Organic Chemistry 3^{rd} Ed. (Plenum Press) Vols A and B(1992). Furthermore, methods of generating and selecting antibodies explained in Adler et al., A natively paired antibody library yields drug leads with higher sensitivity and specificity than a randomly paired antibody library, MAbs (2018), and Adler et al., Rare, high-affinity mouse anti-PD-L1 antibodies that function in checkpoint blockade, discovered using microfluidics and molecular genomics, MAbs (2017), which are incorporated by reference in its entirety herein, can be employed.

[0295] 8.1.1. Example 1: Generation of Antigen Binding Protein

[0296] Mouse Immunization and Sample Preparation:

[0297] First, transgenic mice carrying inserted human immunoglobulin genes were immunized with soluble PD-L1 immunogen of SEQ ID NO: 7001 (i.e., His-tagged PD-L1 protein (R&D Systems)) using TiterMax as an adjuvant. One μg of immunogen was injected into each hock and 3 μg of immunogen was administered intraperitoneally, every third day for 15 days. Titer was assessed by enzyme-linked immunosorbent assay (ELISA) on a 1:2 dilution series of each animal's serum, starting at a 1:200 dilution. A final intravenous boost of 2.5 μg/hock without adjuvant was given to each animal before harvest. Lymph nodes (popliteal, inguinal, axillary, and mesenteric) were surgically removed after sacrifice. Single cell suspensions for each animal were made by manual disruption followed by passage through a 70 μm filter. Next, the EasySep™ Mouse Pan-B Cell Isolation Kit (Stemcell Technologies) negative selection kit was used to isolate B cells from each sample. The lymph node B cell populations were quantified by counting on a C-Chip hemocytometer (Incyto) and assessed for viability using Trypan blue. The cells were then diluted to 5,000-6,000 cells/mL in phosphate-buffered saline (PBS) with 12% OptiPrep™ Density Gradient Medium (Sigma). This cell mixture was used for microfluidic encapsulation. Approximately one million B cells were run from each of the six animals through the emulsion droplet microfluidics platform.

[0298] Generating Paired Heavy and Light Chain Libraries:

[0299] A DNA library encoding scFv from RNA of single cells, with native heavy-light Ig pairing intact, was generated using the emulsion droplet microfluidics platform or vortex emulsions. The method for generating the DNA library was divided into 1) poly(A)+mRNA capture, 2) multiplexed overlap extension reverse transcriptase polymerase chain reaction (OE-RT-PCR), and 3) nested PCR to remove artifacts and add adapters for deep sequencing or yeast display libraries. The scFv libraries were generated from approximately one million B cells from each animal that achieved a positive ELISA titer.

[0300] For poly(A)+mRNA capture, a custom designed co-flow emulsion droplet microfluidic chip fabricated from glass (Dolomite) was used. The microfluidic chip has two input channels for fluorocarbon oil (Dolomite), one input channel for the cell suspension mix described above, and one input channel for oligo-dT beads (NEB) at 1.25 mg/ml in cell lysis buffer (20 mM Tris pH 7.5, 0.5 M NaCl, 1 mM ethylenediaminetetraacetic acid (EDTA), 0.5% Tween-20, and 20 mM dithiothreitol). The input channels were etched to 50 μm by 150 μm for most of the chip's length, narrow to 55 μm at the droplet junction, and were coated with hydrophobic Pico-Glide (Dolomite). Three Mitos P-Pump pressure pumps (Dolomite) were used to pump the liquids through the chip. Droplet size depends on pressure, but typically droplets of −45 mm diameter are optimally stable. Emulsions were collected into chilled 2 ml microcentrifuge tubes and incubated at 40° C. for 15 minutes for mRNA capture. The beads were extracted from the droplets using Pico-Break (Dolomite). In some embodiments, similar single cell partitioning emulsions were made using a vortex.

[0301] For multiplex OE-RT-PCR, glass Telos droplet emulsion microfluidic chips were used (Dolomite). mRNA-bound beads were re-suspended into OE-RT-PCR mix and injected into the microfluidic chips with a mineral oil-based surfactant mix (available commercially from GigaGen) at pressures that generate 27 μm droplets. The OE-RT-PCR mix contains 2× one-step RT-PCR buffer, 2.0 mM MgSO₄, SuperScript III reverse transcriptase, and Platinum Taq (Thermo Fisher Scientific), plus a mixture of primers directed against the IgK C region, the IgG C region, and all V regions (FIG. 2). The overlap region was a DNA sequence that encodes a Gly-Ser rich scFv linker sequence. The DNA fragments were recovered from the droplets using a droplet breaking solution (available commercially from GigaGen) and then purified using QIAquick PCR Purification Kit (Qiagen). In some embodiments, similar OE-RT-PCR emulsions were made using a vortex.

[0302] For nested PCR (FIG. 2), the purified OE-RT-PCR product was first run on a 1.7% agarose gel for 80 minutes at 150 V. A band at 1200-1500 base pair (bp) corresponding to the linked product was excised and purified using NucleoSpin Gel and PCR Clean-up Kit (Macherey Nagel). PCR was then performed to add adapters for Illumina sequencing or yeast display; for sequencing, a randomer of seven nucleotides is added to increase base calling accuracy in subsequent next generation sequencing steps. Nested PCR was performed with 2× NEBNext High-Fidelity amplification mix (NEB) with either Illumina adapter containing primers or primers for cloning into the yeast expression vector. The nested PCR product was run on a 1.2% agarose gel for 50 minutes at 150V. A band at 800-1100 bp was excised and purified using NucleoSpin Gel and PCR Clean-up Kit (Macherey Nagel).

[0303] In some embodiments, scFv libraries were not natively paired, for example, randomly paired by amplifying scFv directly from RNA isolated from B cells.

[0304] 8.1.2. Example 2: Isolation of PD-L1 Binders by Yeast Display

[0305] Library Screening:

[0306] Human IgG1-Fc (Thermo Fisher Scientific) and PD-L1 (R&D Systems) proteins were biotinylated using the EZ-Link Micro Sulfo-NHS-LC-Biotinylation kit (Thermo Fisher Scientific). The biotinylation reagent was resuspended to 9 mM and added to the protein at a 50-fold molar excess. The reaction was incubated on ice for 2 hours and then the biotinylation reagent was removed using Zeba desalting columns (Thermo Fisher Scientific). The final protein concentration was calculated with a Bradford assay.

[0307] Next, the six DNA libraries were expressed as surface scFv in yeast. A yeast surface display vector (pYD) that contains a GAL1/10 promoter, an Aga2 cell wall tether, and a C-terminal c-Myc tag was built. The GAL1/10 promoter induces expression of the scFv protein in medium that contains galactose. The Aga2 cell wall tether was required to shuttle the scFv to the yeast cell surface and tether the scFv to the extracellular space. The c-Myc tag was used during the flow sort to stain for yeast cells that express in-frame scFv protein. Saccharomyces cerevisiae cells (ATCC) were electroporated (Bio-Rad Gene Pulser II; 0.54 kV, 25 uF, resistance set to infinity) with gel-purified nested PCR product and linearized pYD vector for homologous recombination in vivo. Transformed cells were expanded and induced with galactose to generate yeast scFv display libraries.

[0308] Two million yeast cells from the expanded scFv libraries were stained with anti-c-Myc (Thermo Fisher Scientific A21281) and an AF488-conjugated secondary antibody (Thermo Fisher Scientific A11039). To select scFv-expressing cells that bind to PD-L1, biotinylated PD-L1 antigen was added to the yeast culture (7 nM final) during primary antibody incubation and then stained with PE-streptavidin (Thermo Fisher Scientific). Yeast cells were flow sorted on a BD Influx (Stanford Shared FACS Facility) for double-positive cells (AF488C/PEC), and recovered clones were then plated on SD-CAA plates with kanamycin, streptomycin, and penicillin (Teknova) for expansion. The expanded first round FACS clones were then subjected to a second round of FACS with the same antigen at the same molarity (7 nM final). Plasmid minipreps (Zymo Research) were prepared from yeast recovered from the final FACS sort. Tailed-end PCR was used to add Illumina adapters to the plasmid libraries for deep sequencing.

[0309] In a typical FACS dot plot, the upper right quadrant contains yeast that stain for both antigen binding and scFv expression (identified by a C-terminal c-Myc tag). The lower left quadrant contains yeast that do not stain for either the antigen or scFv expression. The lower right quadrant contains yeast that express the scFv but do not bind the antigen. The frequency of binders in each repertoire was estimated by dividing the count of yeast that double stain for antigen and scFv expression by the count of yeast that express an scFv. Libraries generated from immunized mice yielded low percentages of scFv binders (ranging from 0.08%-1.28%) when sorted at 7 nM final antigen concentration. There was no clear association between serum titer and the frequency of binders in a repertoire. Following expansion of these sorted cells, a second round of FACS at 7 nM final antigen concentration was used to increase the specificity of the screen. The frequency of binders in the second FACS was always substantially higher than the first FACS, ranging from 8.39%-84.4%. Generally, lower frequency of binders in the first sort yielded lower frequency of binders in the second sort. Presumably, this is due to lower gating specificity for samples that have fewer bona fide binders in the original repertoire.

[0310] Deep Repertoire Sequencing:

[0311] PD-L1-binding clones were recovered as a library (“a library of PD-L1 binding clones”), and subjected to deep repertoire sequencing. Deep repertoire sequencing determines the sequences of all paired variable (V(D)J) regions of both heavy and light chain sequences. The library of PD-L1 binding clones were deposited under ATCC Accession No. PTA-125513 under the Budapest Treaty on Nov. 20, 2018, under ATCC Account No. 97361 (American Type Culture Collection (ATCC), 10801 University Boulevard, Manassas, Va. 20110 USA). Each clone in the library contains an scFv comprising a paired variable (V(D)J) regions of both heavy and light chain sequences originating from a single cell. Deep repertoire sequencing determines the sequences of all paired variable (V(D)J) regions of both heavy and light chain sequences. Some of the heavy and light chain sequences obtained from sequencing the yeast scFv library are provided in SEQ ID NOS: 1-25 and SEQ ID NOS: 101-125. Additional sequences obtained from sequencing the yeast scFv library are provided in SEQ ID NOS 8000-8305. Specifically, their variable light chain (V_{L}) sequences include SEQ ID NOS: 8000-8152. Their heavy chain (V_{H}) sequences include SEQ ID NOS: 8153-8305.

[0312] Deep antibody sequencing libraries were quantified using a quantitative PCR Illumina Library Quantification Kit (KAPA) and diluted to 17.5 pM. Libraries were sequenced on a MiSeq (Illumina) using a 500 cycle MiSeq Reagent Kit v2, according to the manufacturer's instructions. To obtain high quality sequence reads with maintained heavy and light chain linkage, sequencing was performed in two separate runs. In the first run (“linked run”), the scFv libraries was directly sequenced to obtain forward read of 340 cycles for the light chain V-gene and CDR3, and reverse read of 162 cycles that cover the heavy chain CDR3 and part of the heavy chain V-gene. In the second run (“unlinked run”), the scFv library was first used as a template for PCR to separately amplify heavy and light chain V-genes. Then, forward reads of 340 cycles and reverse reads of 162 cycles for the heavy and light chain Ig were obtained separately. This produces forward and reverse reads that overlap at the CDR3 and part of the V-gene, which increases confidence in nucleotide calls.

[0313] To remove base call errors, the expected number of errors (E) for a read were calculated from its Phred scores. By default, reads with E>1 were discarded, leaving reads for which the most probable number of base call errors is zero. As an additional quality filter, singleton nucleotide reads were discarded because sequences found two or more times have a high probability of being correct. Finally, high-quality, linked antibody sequences were generated by merging filtered sequences from the linked and unlinked runs. Briefly, a series of scripts that first merged forward and reverse reads from the unlinked run was written in Python. Any pairs of forward and reverse sequences that contained mismatches were discarded. Next, the nucleotide sequences from the linked run were used to query merged sequences in the unlinked run. The final output from the scripts is a series of full-length, high-quality variable (V(D)J) sequences, with native heavy and light chain Ig pairing.

[0314] To identify reading frame and FR/CDR junctions, a database of well-curated immunoglobulin sequences was first processed to generate position-specific sequence matrices (PSSMs) for each FR/CDR junction. These PSSMs were used to identify FR/CDR junctions for each of the merged nucleotide sequences generated using the processes described above. This identified the protein reading frame for each of the nucleotide sequences. CDR sequences that have a low identify score to the PSSMs are indicated by an exclamation point. Python scripts were then used to translate the sequences. Reads were required to have a valid predicted CDR3 sequence, so, for example, reads with a frame-shift between the V and J segments were discarded. Next, UBLAST was run using the scFv nucleotide sequences as queries and V and J gene sequences from the IMGT database as the reference sequences. The UBLAST alignment with the lowest E-value was used to assign V and J gene families and compute % ID to germline.

[0315] Each animal yielded 38-50 unique scFv sequences present at 0.1% frequency or greater after the second FACS selection, including a total of 25 unique scFv candidate binders (SEQ ID Nos: 1-25 for light chains; SEQ ID Nos: 101-125 for heavy chains). The light chain having a sequence of SEQ ID NO: [n] and the heavy chain having a sequence of SEQ ID NO: [100+n] are a cognate pair from a single cell, and forming a single scFv. For example, the light chain of SEQ ID NO:1 and the heavy chain of SEQ ID NO:101 are a cognate pair, the light chain of SEQ ID NO:24 and the heavy chain of SEQ ID NO:124 are a cognate pair, etc.

[0316] A25 was derived from a mutagenesis screen of A1.

[0317] In this method, the two rounds of FACS resulted in enrichment of the PD-L1-binding scFvs. In addition, many scFv were not detected in the sequencing data from the initial population of B cells from the immunized mice and most of the scFv present in the pre-sort mouse repertoires were eliminated following FACS. Therefore, this work suggests that most of the antibodies present in the repertoires of immunized mice are not strong binders to the immunogen and that this method can enrich for rare nM-affinity binders from the initial population of B cells from immunized mice.

[0318] 8.1.3. Example 3: Biological Characteristics of Antigen Binding Protein

[0319] scFv sequences that were present at low frequency in pre-sort libraries and became high frequency in post-sort libraries were then synthesized as full-length mAbs in Chinese hamster ovary (CHO) cells. These mAbs comprise the 2-3 most abundant sequences in the second round of FACS for each animal.

[0320] Target Binding Profiles:

[0321] The binding specificity and affinity of each full-length antibody towards PD-L1 were determined using BLI and/or SPR. Anti-human PD-L1 affinities were measured using SPR (except for A25, which was performed using BLI). Anti-cyno PD-L1 and anti-mouse PD-L1 affinities were measured using BLI.

[0322] For BLI, antibodies were loaded onto an Anti-Human IgG Fc (AHC) biosensor using the Octet Red96 system (ForteBio). Loaded biosensors were dipped into antigen dilutions beginning at 300 nM, with 6 serial dilutions at 1:3. Kinetic analysis was performed using a 1:1 binding model and global fitting.

[0323] For SPR, a moderate density (»1,000 Response Units) of an antihuman IgG-Fc reagent (Southern Biotech 2047-01) was amine-coupled to a Xantec CMD-50M chip (50 nm carboxymethyldextran medium density of functional groups) activated with 133 mM EDC (Sigma) and 33.3 mM S-NHS (ThermoFisher) in 100 mM MES pH 5.5. Then, goat anti-Human IgG Fc (Southern Biotech 2047-01) was coupled for 10 minutes at 25 mg/m L in 10 mM Sodium Acetate pH 4.5 (Carterra Inc.). The surface was then deactivated with 1 M ethanolamine pH 8.5 (Carterra Inc.). Running buffer used for the lawn immobilization was HBS-EPC (10 mM HEPES, 150 mM NaCl, 3 mM EDTA, 0.05% Tween 20, pH 7.4; Teknova).

[0324] The sensor chip was then transferred to a continuous flow microspotter (CFM; Carterra Inc.) for array capturing. The mAb supernatants were diluted 50-fold (3-10 mg/mL final concentration) into HBS-EPC with 1 mg/mL BSA. The samples were each captured twice with 15-minute and 4-minute capture steps on the first and second prints, respectively, to create multiple densities, using a 65 mL/min flow rate. The running buffer in the CFM was also HBS-EPC.

[0325] Next, the sensor chip was loaded onto an SPR reader (MX-96 system; Ibis Technologies) for the kinetic analysis. PD-L1 was injected at five increasing concentrations in a four-fold dilution series with concentrations of 1.95, 7.8, 31.25, 125, and 500 nM in running buffer (HBS-EPC with 1.0 mg/mL BSA). PD-L1 injections were 5 minutes with a 15-minute dissociation at 8 mL/second in a non-regenerative kinetic series. An injection of the goat anti-Human IgG Fc capture antibody at 75 mg/mL was injected at the end of the series to verify the capture level of each mAb. Binding data was double referenced by subtracting an interspot surface and a blank injection and analyzed for ka (on-rate), kd (off-rate), and KD (affinity) using the Kinetic Interaction Tool software (Carterra Inc.).

[0326] For cell surface binding studies, PD-L1 expressing Flp-In CHO (Thermo Fisher Scientific) cells were generated and mixed at a 50:50 ratio. One million cells were stained with 1 μg of the disclosed anti-PD-L1 recombinant antibodies in 200 μl of MACS Buffer (DPBS with 0.5% bovine serum albumin and 2 mM EDTA) for 30 minutes at 4 C. Cells were then co-stained with anti-human irrelevant target-APC and anti-human IgG Fc-PE antibodies for 30 minutes at 4 C. An anti-human PD-L1 antibody was used as a control for these mixing experiments and cell viability was assessed with DAPI. Flow cytometry analysis was conducted on a BD Influx at the Stanford Shared FACS Facility and data was analyzed using FlowJo.

[0327] We identified antibodies that specifically bind to PD-L1. Affinity to PD-L1 (K_{D}) of each antibody is provided in TABLE 6.

TABLE 6

| | | Promega | | | |
|---|---|---|---|---|---|
| | Binding | assay | Affinity to | | |
| | to PD- | antagonist | Human | Affinity to | |
| | L1 | (EC50, | PD-L1 | Cyno PD- | Epitope |
| Ab# | FACS | ug/mL) | (nM) | L1 (nM) | bin |
| Atezolizumab | Yes | 0.093 | 0.74 | 94.5 | A |
| A1 | Yes | 0.0415 | 0.13 | 0.31 | A |
| A2 | Yes | 0.042 | 3.5 | 5.2 | A |
| A3 | Yes | 0.12 | 5 | 8.3 | A |
| A4 | Yes | 0.198 | 6.4 | 11.3 | A |
| A5 | Yes | 0.0985 | 15 | 8.6 | A |
| A6 | Yes | 0.111 | 16 | no binding | A |
| A7 | Yes | 0.151 | 17 | 23 | A |
| A8 | Yes | 0.621 | 22 | 18.9 | A |
| A9 | Yes | 0.28 | 26 | 20.9 | A |
| A10 | Yes | 0.27 | 42 | 27.4 | A |
| A11 | Yes | 0.158 | 66 | 17.7 | A |
| A12 | Yes | 3.13 | 80 | 75.9 | A |
| A13 | Yes | 1.124 | 124 | 101 | A |
| A14 | Yes | 1.23 | 148 | 57.7 | A |
| A15 | Yes | 0.55 | 227 | no binding | A |
| A16 | Yes | no blocking | 246 | 532 | A |
| A17 | Yes | 2.25 | 335 | 762 | A |
| A18 | Yes | 0.088 | 442 | not tested | A |
| A19 | Yes | no blocking | 567 | not tested | B |
| A20 | Yes | no blocking | 675 | not tested | A |
| A21 | Yes | no blocking | 860 | not tested | B |
| A22 | Yes | no blocking | no binding | 38.5 | not tested |
| A23 | Yes | 9.8 | no binding | not tested | not tested |
| A24 | Yes | no blocking | no binding | not tested | not tested |
| A25 | Yes | 0.063 | 2.4 | not tested | not tested |

[0328] The affinity of each antibody against PD-L1, as determined using SPR (Carterra), the on rate, off rate, and K_{D} are shown in TABLE 7. A25 was derived from a mutagenesis screen of A1, and its affinity was determined using BLI (ForteBio).

TABLE 7

| Antibody | kₒₙ (M-1 s-1) | k_{off} (s-1) | K_{D} (M) |
|---|---|---|---|
| Atezolizumab | 4.20E+05 | 3.10E−04 | 7.38E−10 |
| A1 | 1.00E+06 | 1.30E−04 | 1.30E−10 |
| A2 | 1.10E+06 | 3.80E−03 | 3.45E−09 |
| A3 | 3.70E+05 | 1.90E−03 | 5.14E−09 |
| A4 | 1.60E+05 | 1.00E−03 | 6.25E−09 |
| A5 | 5.90E+05 | 8.60E−03 | 1.46E−08 |
| A6 | 3.10E+05 | 4.90E−03 | 1.58E−08 |
| A7 | 5.70E+05 | 9.50E−03 | 1.67E−08 |
| A8 | 5.70E+05 | 1.30E−02 | 2.28E−08 |
| A9 | 2.10E+05 | 5.50E−03 | 2.62E−08 |
| A10 | 4.40E+05 | 1.80E−02 | 4.09E−08 |
| A11 | 1.70E+05 | 1.10E−02 | 6.47E−08 |
| A12 | 1.60E+05 | 1.30E−02 | 8.13E−08 |
| A13 | 3.10E+05 | 3.90E−02 | 1.26E−07 |
| A14 | 2.60E+05 | 3.80E−02 | 1.46E−07 |
| A15 | 9.70E+04 | 2.20E−02 | 2.27E−07 |
| A16 | 1.40E+05 | 3.50E−02 | 2.50E−07 |
| A17 | 2.30E+05 | 7.70E−02 | 3.35E−07 |
| A18 | 8.00E+04 | 3.50E−02 | 4.38E−07 |
| A19 | 6.20E+03 | 3.50E−03 | 5.65E−07 |
| A20 | 1.60E+05 | 1.10E−01 | 6.88E−07 |
| A21 | 1.50E+04 | 1.30E−02 | 8.67E−07 |
| A22 | no binding | | |
| A23 | no binding | | |
| A24 | no binding | | |
| A25 | 3.31E+05 | 8.09E−04 | 2.44E−09 |

[0329] In Vitro Cellular Assays:

[0330] For analysis of the antibodies' ability to block the PD-1/PD-L1 interaction, the PD-1/PD-L1 Blockade Bioassay (Promega) was used according to the manufacturer's instructions. On the day prior to the assay, PD-L1 aAPC/CHO-K1 cells were thawed into 90% Ham's F-12/10% fetal bovine serum (FBS) and plated into the inner 60 wells of two 96-well plates. The cells were incubated overnight at 37° C., 5% CO₂. On the day of assay, antibodies were diluted in 99% RPMI/1% FBS. The antibody dilutions were added to the wells containing the PD-L1 aAPC/CHO-K1 cells, followed by addition of PD-1 effector cells (thawed into 99% RPMI/1% FBS). The cell/antibody mixtures were incubated at 37° C., 5% C₀2 for 6 hours, after which Bio-Glo Reagent was added and luminescence was read using a Spectramax i3× plate reader (Molecular Devices). Fold-induction was plotted by calculating the ratio of [signal with antibody]/[signal with no antibody], and the plots were used to calculate the IC50 using SoftMax Pro (Molecular Devices). In-house produced pembrolizumab was used as a positive control, and an antibody binding to an irrelevant antigen was used as a negative control.

[0331] Binding of PD-1 to PD-L1 leads to inhibition of T cell signaling. Antibodies that bind PD-L1 and antagonize PD-1/PD-L1 interactions can therefore remove this inhibition, allowing T cells to be activated. PD-1/PD-L1 checkpoint blockade was tested through an in vitro cellular Nuclear Factor of Activated T cells (NFAT) luciferase reporter assay. In this assay, antibodies whose anti-PD-L1 epitopes fall inside the PD-L1 binding domain antagonize PD-1/PD-L1 interactions, resulting in an increase of the NFAT-luciferase reporter. The full-length mAb candidates that can bind PD-L1 expressed in CHO cells were assayed. To generate an IC50 value for each mAb, measurements were made across several concentrations. It was found that some full-length mAbs are functional in checkpoint blockade in a dose dependent manner as summarized in TABLE 6. The results from the PD-L1 blocking assay are shown in FIG. 3.

[0332] The ability of each antibody to block the interaction of PD-L1 and CD80 was evaluated with ELISA. Plates were coated with rhPD-L1-Fc and then blocked with 1× PBS with 2% w/v BSA. After blocking a dilution series of the indicated antibody was added to the plate. Then, to determine how much CD80 was still able to bind plate bound PD-L1, after the plates were washed, rhCD80-His was added to the plate. Unbound CD80-His was washed away and mouse anti-His-HRP was added. TMB was used to determine how much CD80-His bound to the plate bound PD-L1 in the presence of each antibody. The EC50 for blocking CD80 is shown in TABLE 8.

TABLE 8

| Antibody | EC50 for blocking CD80 (ug/ml) |
|---|---|
| Atezolizumab | 0.25 |
| A1 | 0.4 |
| A2 | 0.87 |
| A3 | 0.99 |
| A4 | 1.25 |
| A5 | 0.97 |
| A6 | 2.62 |
| A7 | 1.88 |
| A8 | 0.46 |
| A9 | 1.49 |
| A10 | 2.24 |
| A11 | 0.56 |
| A12 | no blocking |
| A13 | 0.6 |
| A14 | 0.6 |
| A15 | not tested |
| A16 | 0.64 |
| A17 | not tested |
| A18 | not tested |
| A19 | not tested |
| A20 | not tested |
| A21 | not tested |
| A22 | not tested |
| A23 | not tested |
| A24 | not tested |
| A25 | 0.26 |

[0333] In vitro cell killing assays are used to test antibodies for efficacy against tumor cells. Fresh tumor samples are first obtained from donors. Single cell suspensions are generated from the tumors using a commercial kit (Miltenyi), and then isolate PD-L1-positive cells are isolated using FACS. Next, using a commercial kit (BioVision), populations of target cells are labeled with carboxyfluorosuccinimide ester (CF SE) and 7-aminoactinomycin D (7-AAD). CFSE labels live cells and 7-AAD labels apoptotic and necrotic cells. A dilution series of anti-PD-L1 antibodies and NK cells are then mixed with the PD-L1-expressing tumor cells. Cell killing, or ADCC, is then quantified using FACS.

[0334] Similar assays are performed with tumor cell lines instead of primary tumor cells. Cell killing is also measured directly using label-free measurement devices such as the xCELLigence Sytem from Acea Biosciences.

[0335] Epitope Binning:

[0336] Epitope binning was performed using high-throughput Array SPR in a modified classical sandwich approach. A sensor chip was functionalized using the Carterra CFM and methods similar to the SPR affinity studies, except a CMD-200M chip type is used (200 nm carboxymethyl dextran, Xantec) and mAbs were coupled at 50 mg/mL to create a surface with higher binding capacity (3,000 reactive units immobilized). The mAb supernatants were diluted at 1:1 or 1:10 in running buffer, depending on the concentration of the mAb in the supernatant.

[0337] The sensor chip was placed in the MX-96 instrument, and the captured mAbs (“ligands”) were crosslinked to the surface using the bivalent amine reactive linker bis(sulfosuccinimidyl) suberate (BS3, ThermoFisher), which was injected for 10 minutes at 0.87 mM in water. Excess activated BS3 was neutralized with 1 M ethanolamine pH 8.5. For each binning cycle, a 7-minute injection of 250 mg/mL human IgG (Jackson ImmunoResearch 009-000-003) was used to block reference surfaces and any remaining capacity of the target spots.

[0338] Next, 250 nM PD-L1 protein were injected onto the sensor chip, followed by injections of the diluted mAb supernatants (“analytes”) or buffer blanks as negative controls. Thus, the analyte mAb only bound to the antigen if it was not competitive with the ligand mAb. At the end of each cycle, a one minute regeneration injection was performed using a solution of 4 parts Pierce IgG Elution Buffer (ThermoFisher #21004), one part 5 M NaCl (0.83 M final), and 1.25 parts 0.85% H3PO4 (0.17% final).

[0339] A network community plot algorithm in an SPR epitope data analysis software package (Carterra Inc.) was then used to determine epitope bins. Note that the clustering algorithm groups mAbs for which only analyte data are available separately from the mAbs for which both ligand and analyte data are available. This phenomenon is an artifact of the incomplete competitive matrix. mAbs with both ligand and analyte data had more mAb-mAb measurements, resulting in more mAb-mAb connections, which led to a closer relationship in the community plot.

[0340] The epitope binning revealed that most of the antibodies were in the same bin as atezolizumab (FIG. 4).

### 9. INCORPORATION BY REFERENCE

[0341] All publications, patents, patent applications and other documents cited in this application are hereby incorporated by reference in their entireties for all purposes to the same extent as if each individual publication, patent, patent application or other document were individually indicated to be incorporated by reference for all purposes.

### 10. EQUIVALENTS

[0342] While various specific embodiments have been illustrated and described, the above specification is not restrictive. It will be appreciated that various changes can be made without departing from the spirit and scope of the present disclosure(s). Many variations will become apparent to those skilled in the art upon review of this specification.

TABLE 9
provides sequences and sequence identifiers for the antibody
light chains, antibody heavy chains, CDRs, and human PD-L1.

| SEQ | | |
|---|---|---|
| ID | | Chain |
| NO | Sequence | (Antibody) |
| 1 | EIVMTQSPATLSLSPGERATLSCWASQSVSSSYLSWYQQKPGQAPRLLIYG | L1 (A1) |
| | ASTRATGIPARFSGSGSGTDFTLTISSLQPEDFAVYYCQQDYNLPYTFGQGT | |
| | KLEIK | |
| 2 | DIQMTQSPSSLSASVGDRVTITCRASQGISNYLAWFQQKPGKAPKSLIYAAS | L2 (A2) |
| | SLQSGVPSKFSGSGSGTDFTLTISSLQPEDFATYYCQQYNSYPYTFGQGTKL | |
| | EIK | |
| 3 | AIQMTQSPSSLSASVGDRVTITCRASQDIRNDLGWYQQQPGKAPKLLIYAA | L3 (A3) |
| | SSLQSGVPSRFSGSGSGTDFTLTISSLQPEDFATYYCLQDYNYPPTFGQGTK | |
| | VEIK | |
| 4 | AIQMTQSPSSLSASVGDRVTITCRASQDIRNDLGWYQQQPGKAPKLLIYAA | L4 (A4) |
| | SSLQSGVPSRFSGSGSGTDFTLTISSLQPEDFATYYCLQDYNYPPTFGQGTK | |
| | VEIK | |
| 5 | EIVMTQSPATLSLSPGERATLSCRASQSVSSTYLSWYQQKPGQAPRLLIFGA | L5 (A5) |
| | STRATGIPARFSGSGSGTDFTLTISSLQPEDFAVYYCQQDYNLPPTFGPGTK | |
| | VDIK | |
| 6 | EIVMTQSPATLSLSPGERATLSCRASQSVSSSYLSWYQQKPGQAPRLLIYGA | L6 (A6) |
| | STRATGIPARFSGSGSGTDFTLTISSLQPEDFAVYYCQQDYNLFTFGPGTKV | |
| | DIK | |
| 7 | EIVMTQSPTTLSLSPGERATLSCRASQSVSSSYLSWYQQKPGQAPRLLIYGA | L7 (A7) |
| | STRATGIPARFSGSGSGTDFTLTISSLQPEDFAVYYCQQDYNLRTFGQGTKV | |
| | EIK | |
| 8 | DIQMTQSPSSLSASVGDRVTITCRASQGIRNDLGWYQQKPGKAPKRLIYAA | L8 (A8) |
| | SSLQSGVPSRFSGSGSGTEFTLTISSLQPEDFATYYCLQHNSYPYTFGQGTK | |
| | LEIK | |
| 9 | EIVMTQSPATLSLSPGERATLSCRASQSVSSSYLSWYQQKPGQAPRLLMYG | L9 (A9) |
| | ASTRATGIPARFSGSGSGTDFTLTISSLQPEDFAVYYCQQDYNLPYTFGQGT | |
| | KLEIK | |
| 10 | EIVMTQSPATLSLSPGERATLSCRASQSVSSSYLSWYQQKPGQAPRLLIYGA | L10 (A10) |
| | STRATGIPARFSGSGSGTDFTLTISSLQPEDFAVYYCQQDYNLPHTFGQGTK | |
| | LEIK | |
| 11 | AIQMTQSPSSLSASVGDRVTITCRASQGIRNDLGWYQQKPGKAPKLLIYAA | L11 (A11) |
| | SSLQSGVPSRFSGSGSGTDFTLTISSLQPEDFATYYCLQDYNYPYTFGQGTK | |
| | LEIK | |
| 12 | DIQMTQSPSSLSASVGDRVTITCRASQGIRNDLGWYQQKPGKAPKRLIYAA | L12 (Al2) |
| | SSLQSGVPSRFSGSGSGTEFTLTISSLQPEDFATYYCLQHNSYPRTFGQGTK | |
| | VEIK | |
| 13 | EIVMTQSPATLSLSPGERATLSCRASQSVSSSYLSWYQQKPGQAPRLLIYGA | L13 (A13) |
| | STRATGIPARFSGSGSGTDFTLTISSLQPEDFAVYYCQQDYNLITFGQGTRLE | |
| | IK | |
| 14 | EIVMTQSPATLSLSPGERATLSCRASQSVSSSYLSWYQQKPGQAPRLLIYGA | L14 (A14) |
| | STRATGIPARFSGSGSGTDFTLTISSLQPEDFAVYYCQQDYNLPHTFGQGTK | |
| | LEIK | |
| 15 | DIQMTQSPSSLSASVGDRVTITCRASQGIRNDLGWYQQKPGKAPKRLIYAA | L15 (A15) |
| | SSLQSGVPSRFSGSGSGTEFTLTISSLQPEDFATYYCLQHDSYPLTFGGGTK | |
| | VEIK | |
| 16 | DIQMTQSPSSLSASVGDRVTITCRASQGIRNDLGWYQQKPGKAPKRLIYAA | L16 (A16) |
| | SSLQSGVPSRFSGSGSGTEFTLTISSLQPEDFATYYCLQHNSYPRTFGQGTK | |
| | VEIK | |
| 17 | DIQMTQSPSSLSASVGDRVTITCRASQGIRNDLGWYQQKPGKAPKRLIYAA | L17 (A17) |
| | SSLQSGVPSRFSGSGSGTEFTLTISSLQPEDFATYYCLQHNTYPWTFGQGTK | |
| | VEIK | |
| 18 | EIVMTQSPATLSVSPGERATLSCRASQSVSSNLAWYQQKPGQAPRLLIYGA | L18 (A18) |
| | STRATGIPARFSGSGSGTEFTLTISSLQSEDFAVYYCQQYNNWPYTFGQGTK | |
| | LEIK | |
| 19 | DIQLTQSPSFLSASVGDRVTITCRASQGISSYLAWYQQKPGKAPKLLIYDAS | L19 (A19) |
| | TLQSGVPSRFSGSGSGTEFTLTISSLQPEDFAIYYCQQLNTYPLTFGGGTKVE | |
| | IK | |
| 20 | DIQMTQSPSSLSASVGDRVTITCRASQGIRNDLGWYQQKPGKAPKRLIYAA | L20 (A20) |
| | SSLQSGVPSRFSGSGSGTEFTLTISSLQPEDFATYYCLQHNSYPYTFGQGTK | |
| | LEIK | |
| 21 | DIQLTQSPPFLSASVGDRVTITCRASQGISSYLAWYQQKPGKAPKLLIYAAS | L21 (A21) |
| | TLQSGVPSRFSGSGSGTEFTLTISSLQPEDFATYYCQQLNSYPFTFGQGTKLE | |
| | IK | |
| 22 | DIQMTQSPSSLSASVGDRVTITCRASQGISSWLAWYQQKPEKAPKSLIYAA | L22 (A22) |
| | SSLQSGVPSRFSGSGSGTDFTLTISSLQPEDFATYYCQQYNSYPPTVGGGTK | |
| | VEIK | |
| 23 | DIQMTQSPSSLSASVGDRVTITCRASQGIRNDLGWYQQKPGKAPKRLIYAA | L23 (A23) |
| | SSLQSGVPSRFSGSGSGTEFTLTISSLQPEDFATYYCLQHNSYPMFTFGQGT | |
| | KLEIK | |
| 24 | EIVMTQSPATLSLSPGERATLSCRASQSVSSSHLSWYQQKPGQAPRLLIYGA | L24 (A24) |
| | STRATGIPARFSGSGSGTDFTLTISSLQPEDFAVYYCQQDYNLLTFGGGTKV | |
| | EIK | |
| 25 | EIVMTQSPATLSLSPGERATLSCWASQSVSSSYLSWYQQKPGQAPRLLIYG | L25 (A25) |
| | ASTRATGIPARFSGSGSGTDFTLTISSLQPEDFAVYYCQQDYYLPYTFGQGT | |
| | KLEIK | |
| 101 | QVQLVQSGAEVKKPGASVKVSCKASGFTFTSYDINWVRQATGQGLEWMG | H1 (Al) |
| | WMHPNSGITGYAQKFQGRVTMTRNTSISTAYMELSSLSSEDTAVYFCARY | |
| | YYVSGSYDYWGQGTLVTVSSA | |
| 102 | EVQLVESGGGLVQPGGSLRLSCAASGFTFSRYDMSWVRQAPGKGLEWVS | H2 (A2) |
| | TISGSGGSTYYADSVKGRFTISRDNSKTTLYLQMISLRAEDTAVYYCAKAG | |
| | FTMIVVAFDYWGQGTLVTVSSA | |
| 103 | QVQLVESGGGVVQPGRSLRLSCAASGFTFSNYGMHWVRQAPGKGLEWV | H3 (A3) |
| | AVIWFDGNTKYYTDSVKGRFTISRDNSKNTLYLQMNSLRAEDTAVYYCAR | |
| | DTTMVPMDVWGQGTTATVSSA | |
| 104 | QVQLVESGGGVVQPGRSLRLSCAASGFTFSNYGMHWVRQAPGKGLEWV | H4 (A4) |
| | AVIWFDGNTKYYTDSVKGRFTISRDNSKNTLYLQMNSLRAEDTAVYYCAR | |
| | DITMVPMDVWGQGTTVTVSSA | |
| 105 | QVQLVESGGGVVQPGRSLRLSCAASGFAFSSYGMHWVRQAPGKGLEWVA | H5 (A5) |
| | LIWFDGNNKFYADSVKGRFTISRDNSKNTLYLQMNSLRAEDTAVYYCARD | |
| | TTAASFDYWGQGTLVTVSSA | |
| 106 | QVQLVESGGGVVQPGRSLRLSCAASGFTFSSYGMHWVRQAPGKGLEWVA | H6 (A6) |
| | VIWFDGSNKYYADSVKGRFTISRDNSKNTLYLQMNSLRAEDTAVYYCAR | |
| | DKTVSPFDIWGQGTMVTVSSA | |
| 107 | QVQLQESGPGLVKPSETLSLTCTVSGGSISSYYWSWIRQPPGKGLEWIGYIF | H7 (A7) |
| | YSGSTNYNPSLKSRVTISVDTSKNQFSLKLSSVTAADTAVYFCARDNWHD | |
| | GGVDYWGQGTLVTVSSA | |
| 108 | QVQLVQSGAEVKKPGASVKVSCKASGYTFTSYGISWVRQAPGQGLEWMG | H8 (A8) |
| | WISAYNGSTNYAQKLQGRVTMTTDTSTSTAYMELRSLRSDDTAVFYCAR | |
| | DDRIAVADYYYYFGMDVWGQGTTVTVSSA | |
| 109 | QVQLVESGGGVVQPGRSLRLSCAASGFTFSSYGMHWVRQAPGKGLEWVA | H9 (A9) |
| | VIWFDGNNKYYADSVKGRFTISRDNSKNTLYLQMNSLRAEDTAVYYCAR | |
| | DVTTVPFDYWGQGTLVTVSSA | |
| 110 | QVQLVESGGGVVQPGRSLRLSCAASGFTFSSYGMHWVRQAPGKGLEWVA | H10 (A10) |
| | VIWYDGINKYYADSVKGRFTISRDNSKNTLYLQMNSLRAEDTAVYYCARD | |
| | STASPFDYWGQGTLVTVSSA | |
| 111 | QVQLVESGGGVVQPGRSLRLSCAASGFTFSSYGIHWVRQAPGKGLEWVA | H11 (A11) |
| | VIWSDGSNKFYADSVKGRFTISRDNSKNTLFLQMSSLRAEDTAVYYCARDI | |
| | AAAIDYWGQGTLVTVSSA | |
| 112 | QVQLVESGGGVVQPGRSLRLSCAASGFTFSSYGMHWVRQAPGKGLEWVA | H12 (A12) |
| | VIWYDGSNKSYADSVKGRFTFSRDNSKNTLYLQMNSLRAEDTAVYYCAR | |
| | DMDYFGLDVWGQGTTVTVSSA | |
| 113 | QVQLQESGPGLVKPSETLSLTCTVSGGSISSYYWSWIRQPPGKGLEWIGYIH | H13 (A13) |
| | YSGSTKYNPSLKSRVTISLDTSKNQFSLKLSSVTAADTAVYYCARDRGIGA | |
| | FDIWGQGTMVTVSSA | |
| 114 | QVQLVESGGGVVQPGRSLRLSCAASGFTFSSYGMHWVRQAPGKGLEWVA | H14 (A14) |
| | VIWYDGSVKYYADSVKGRFTISRDNSKNTLYLQMNSLRAEDTAVYYCAR | |
| | DRTGVPFDYWGQGTLVTVSSA | |
| 115 | QLQLQESGPGLVKPSETLSLTCTVSGGSFNRSNYYWGWIRQPPGKGLEWIG | H15 (A15) |
| | SIYYSGSTYYNPSLKSRLTISADTSKTQFSLKRNSVTAADTAVYYCAREDIV | |
| | VVPAAQPPHFYFGMDVWGQGTTVTVSSA | |
| 116 | QVQLVESGGGVVQPGRSLRLSCAASGFTFSSYGMHWVRQAPGKGLEWVA | H16 (A16) |
| | VIWYDGSNKYYADSVKGRFTISRDNSNDTLFLQMNSLRAEDTAVYYCAR | |
| | DFDWFGMDVWGQGTTVTVSSA | |
| 117 | QVQLQESGPGLVKPSETLSLTCTVSGGSISGYSWSWIRQPPGKGLEWIGYIY | H17 (A17) |
| | YSGSTNNNPSLKSRVTISVDTSKNQFSLKLSSVTAADTAVYFCARDDGIAV | |
| | AGYYFYYGLDVWGQGTTVTVSSA | |
| 118 | QVQLVESGGGVVQPGRSLRLSCAASGFTFSSFALHWVRQAPGKGLEWVA | H18 (A18) |
| | VLWYDGISKYYADSVKGRFTISRDNSKNTLYLQMNSLRAEDTAVYYCAR | |
| | DVVGVHDAFDIWGQGTMVTVSSA | |
| 119 | QVQLVESGGGVVQPGRSLRLSCVASGFTFSSYGMHWVRQAPGKGLEWVA | H19 (A19) |
| | VIWYDGSNKFYIDSVKGRFTISRDNSKNTLYLQMNSLRAEDTAVYYCARG | |
| | GAVAGTSWYYYYGMDVWGQGTTVTVSSA | |
| 120 | QVQLQESGPGLVKPSETLSLTCTVSGGSISSYYWSWIRQPPGKGLEWIGYIY | H20 (A20) |
| | YSGSTNYNPSLKSRVTISVDTSKNQFSLKLSSVTAADTAVYYCARDDRIAV | |
| | GPYYYYYGMDVWGQGTTVTVSSA | |
| 121 | QVQLVESGGGVVQPGRSLRLSCAASGFTFSSYGMHWVRQAPGKGLEWVA | H21 (A21) |
| | VIWYDGSNKFYEDSVKGRFTISRDNSKNTLYLQMNSLRAEDTAVYYCARG | |
| | GVNWNDVGYYYYGMDVWGQGTTVTVSSA | |
| 122 | QVQLVQSGAEVKKPGASVKVSCKASGYTFTSYGISWVRQAPGQGLEWMG | H22 (A22) |
| | WISAYNGNTNYAQKLQGRVTMTTDTSTSTAYMELRSLRSDDTAVYYCAR | |
| | GFYYGSWYFDYWGQGTLVTVSSA | |
| 123 | QVQLVQSGAEVKKPGASVKVSCKASGYTFTNYGISWVRQAPGQGLEWM | H23 (A23) |
| | GWISAYNGNTNYEQKVQGRVTMTTDTSTSTAYMELRSLRSDDTAVYYCA | |
| | RSLTGLFDYWGQGTLVTVSSA | |
| 124 | QLQLQESGPGLVKPSETLSLTCTVSGGSISNSSSFWGWIRQPPGKGLEWIGSI | H24 (A24) |
| | YYSGSTYYNPSLKSRVTMSVDTPKTQSSRKRSSVPAADTAVYYCARLGFG | |
| | GFDYWGQGTLVTVSSA | |
| 125 | QVQLVQSGAEVKKPGASVKVSCKASGFTFTSYDINWVRQATGQGLEWMG | H25 (A25) |
| | WMHPKSGITGYAQKFQGRVTMTRNTSISTAYMELSNLSSEDTAVYFCARY | |
| | NYVSGSYDYWGQGTLVTVSSA | |
| 1001 | QSVSSSY | CDR1-L1 (A1) |
| 1002 | QGISNY | CDR1-L2 (A2) |
| 1003 | QDIRND | CDR1-L3 (A3) |
| 1004 | QDIRND | CDR1-L4 (A4) |
| 1005 | QSVSSTY | CDR1-L5 (A5) |
| 1006 | QSVSSSY | CDR1-L6 (A6) |
| 1007 | QSVSSSY | CDR1-L7 (A7) |
| 1008 | QGIRND | CDR1-L8 (A8) |
| 1009 | QSVSSSY | CDR1-L9 (A9) |
| 1010 | QSVSSSY | CDR1-L10 (A10) |
| 1011 | QGIRND | CDR1-L11 (A11) |
| 1012 | QGIRND | CDR1-L12 (A12) |
| 1013 | QSVSSSY | CDR1-L13 (A13) |
| 1014 | QSVSSSY | CDR1-L14 (A14) |
| 1015 | QGIRND | CDR1-L15 (A15) |
| 1016 | QGIRND | CDR1-L16 (A16) |
| 1017 | QGIRND | CDR1-L17 (A17) |
| 1018 | QSVSSN | CDR1-L18 (A18) |
| 1019 | QGISSY | CDR1-L19 (A19) |
| 1020 | QGIRND | CDR1-L20 (A20) |
| 1021 | QGISSY | CDR1-L21 (A21) |
| 1022 | QGISSW | CDR1-L22 (A22) |
| 1023 | QGIRND | CDR1-L23 (A23) |
| 1024 | QSVSSSH | CDR1-L24 (A24) |
| 1025 | QSVSSSY | CDR1-L25 (A25) |
| 2001 | GAS | CDR2-L1 (A1) |
| 2002 | AAS | CDR2-L2 (A2) |
| 2003 | AAS | CDR2-L3 (A3) |
| 2004 | AAS | CDR2-L4 (A4) |
| 2005 | GAS | CDR2-L5 (A5) |
| 2006 | GAS | CDR2-L6 (A6) |
| 2007 | GAS | CDR2-L7 (A7) |
| 2008 | AAS | CDR2-L8 (A8) |
| 2009 | GAS | CDR2-L9 (A9) |
| 2010 | GAS | CDR2-L10 (A10) |
| 2011 | AAS | CDR2-L11 (A11) |
| 2012 | AAS | CDR2-L12 (A12) |
| 2013 | GAS | CDR2-L13 (A13) |
| 2014 | GAS | CDR2-L14 (A14) |
| 2015 | AAS | CDR2-L15 (A15) |
| 2016 | AAS | CDR2-L16 (A16) |
| 2017 | AAS | CDR2-L17 (A17) |
| 2018 | GAS | CDR2-L18 (A18) |
| 2019 | DAS | CDR2-L19 (A19) |
| 2020 | AAS | CDR2-L20 (A20) |
| 2021 | AAS | CDR2-L21 (A21) |
| 2022 | AAS | CDR2-L22 (A22) |
| 2023 | AAS | CDR2-L23 (A23) |
| 2024 | GAS | CDR2-L24 (A24) |
| 2025 | GAS | CDR2-L25 (A25) |
| 3001 | QQDYNLPYT | CDR3-L1 (A1) |
| 3002 | QQYNSYPYT | CDR3-L2 (A2) |
| 3003 | LQDYNYPPT | CDR3-L3 (A3) |
| 3004 | LQDYNYPPT | CDR3-L4 (A4) |
| 3005 | QQDYNLPPT | CDR3-L5 (A5) |
| 3006 | QQDYNLFT | CDR3-L6 (A6) |
| 3007 | QQDYNLRT | CDR3-L7 (A7) |
| 3008 | LQHNSYPYT | CDR3-L8 (A8) |
| 3009 | QQDYNLPYT | CDR3-L9 (A9) |
| 3010 | QQDYNLPHT | CDR3-L10 (A10) |
| 3011 | LQDYNYPYT | CDR3-L11 (A11) |
| 3012 | LQHNSYPRT | CDR3-L12 (A12) |
| 3013 | QQDYNLIT | CDR3-L13 (A13) |
| 3014 | QQDYNLPHT | CDR3-L14 (A14) |
| 3015 | LQHDSYPLT | CDR3-L15 (A15) |
| 3016 | LQHNSYPRT | CDR3-L16 (A16) |
| 3017 | LQHNTYPWT | CDR3-L17 (A17) |
| 3018 | QQYNNWPYT | CDR3-L18 (A18) |
| 3019 | QQLNTYPLT | CDR3-L19 (A19) |
| 3020 | LQHNSYPYT | CDR3-L20 (A20) |
| 3021 | QQLNSYPFT | CDR3-L21 (A21) |
| 3022 | QQYNSYPPT | CDR3-L22 (A22) |
| 3023 | LQHNSYPMFT | CDR3-L23 (A23) |
| 3024 | QQDYNLLT | CDR3-L24 (A24) |
| 3025 | QQDYYLPYT | CDR3-L25 (A25) |
| 4001 | GFTFTSYD | CDR1-H1 (A1) |
| 4002 | GFTFSRYD | CDR1-H2 (A2) |
| 4003 | GFTFSNYG | CDR1-H3 (A3) |
| 4004 | GFTFSNYG | CDR1-H4 (A4) |
| 4005 | GFAFSSYG | CDR1-H5 (A5) |
| 4006 | GFTFSSYG | CDR1-H6 (A6) |
| 4007 | GGSISSYY | CDR1-H7 (A7) |
| 4008 | GYTFTSYG | CDR1-H8 (A8) |
| 4009 | GFTFSSYG | CDR1-H9 (A9) |
| 4010 | GFTFSSYG | CDR1-H10 (A10) |
| 4011 | GFTFSSYG | CDR1-H11 (A11) |
| 4012 | GFTFSSYG | CDR1-H12 (A12) |
| 4013 | GGSISSYY | CDR1-H13 (A13) |
| 4014 | GFTFSSYG | CDR1-H14 (A14) |
| 4015 | GGSFNRSNYY | CDR1-H15 (A15) |
| 4016 | GFTFSSYG | CDR1-H16 (A16) |
| 4017 | GGSISGYS | CDR1-H17 (A17) |
| 4018 | GFTFSSFA | CDR1-H18 (A18) |
| 4019 | GFTFSSYG | CDR1-H19 (A19) |
| 4020 | GGSISSYY | CDR1-H20 (A20) |
| 4021 | GFTFSSYG | CDR1-H21 (A21) |
| 4022 | GYTFTSYG | CDR1-H22 (A22) |
| 4023 | GYTFTNYG | CDR1-H23 (A23) |
| 4024 | GGSISNSSSF | CDR1-H24 (A24) |
| 4025 | GFTFTSYD | CDR1-H25 (A25) |
| 5001 | MHPNSGIT | CDR2-H1 (A1) |
| 5002 | ISGSGGST | CDR2-H2 (A2) |
| 5003 | IWFDGNTK | CDR2-H3 (A3) |
| 5004 | IWFDGNTK | CDR2-H4 (A4) |
| 5005 | IWFDGNNK | CDR2-H5 (A5) |
| 5006 | IWFDGSNK | CDR2-H6 (A6) |
| 5007 | IFYSGST | CDR2-H7 (A7) |
| 5008 | ISAYNGST | CDR2-H8 (A8) |
| 5009 | IWFDGNNK | CDR2-H9 (A9) |
| 5010 | IWYDGINK | CDR2-H10 (A10) |
| 5011 | IWSDGSNK | CDR2-H11 (A11) |
| 5012 | IWYDGSNK | CDR2-H12 (A12) |
| 5013 | IHYSGST | CDR2-H13 (A13) |
| 5014 | IWYDGSVK | CDR2-H14 (A14) |
| 5015 | IYYSGST | CDR2-H15 (A15) |
| 5016 | IWYDGSNK | CDR2-H16 (A16) |
| 5017 | IYYSGST | CDR2-H17 (A17) |
| 5018 | LWYDGISK | CDR2-H18 (A18) |
| 5019 | IWYDGSNK | CDR2-H19 (A19) |
| 5020 | IYYSGST | CDR2-H20 (A20) |
| 5021 | IWYDGSNK | CDR2-H21 (A21) |
| 5022 | ISAYNGNT | CDR2-H22 (A22) |
| 5023 | ISAYNGNT | CDR2-H23 (A23) |
| 5024 | IYYSGST | CDR2-H24 (A24) |
| 5025 | MHPKSGIT | CDR2-H25 (A25) |
| 6001 | ARYYYVSGSYDY | CDR3-H1 (A1) |
| 6002 | AKAGFTMIVVAFDY | CDR3-H2 (A2) |
| 6003 | ARDTTMVPMDV | CDR3-H3 (A3) |
| 6004 | ARDITMVPMDV | CDR3-H4 (A4) |
| 6005 | ARDTTAASFDY | CDR3-H5 (A5) |
| 6006 | ARDKTVSPFDI | CDR3-H6 (A6) |
| 6007 | ARDNWHDGGVDY | CDR3-H7 (A7) |
| 6008 | ARDDRIAVADYYYYFGMDV | CDR3-H8 (A8) |
| 6009 | ARDVTTVPFDY | CDR3-H9 (A9) |
| 6010 | ARDSTASPFDY | CDR3-H10 (A10) |
| 6011 | ARDIAAAIDY | CDR3-H11 (A11) |
| 6012 | ARDMDYFGLDV | CDR3-H12 (A12) |
| 6013 | ARDRGIGAFDI | CDR3-H13 (A13) |
| 6014 | ARDRTGVPFDY | CDR3-H14 (A14) |
| 6015 | AREDIVVVPAAQPPHFYFGMDV | CDR3-H15 (A15) |
| 6016 | ARDFDWFGMDV | CDR3-H16 (A16) |
| 6017 | ARDDGIAVAGYYFYYGLDV | CDR3-H17 (A17) |
| 6018 | ARDVVGVHDAFDI | CDR3-H18 (A18) |
| 6019 | ARGGAVAGTSWYYYYGMDV | CDR3-H19 (A19) |
| 6020 | ARDDRIAVGPYYYYYGMDV | CDR3-H20 (A20) |
| 6021 | ARGGVNWNDVGYYYYGMDV | CDR3-H21 (A21) |
| 6022 | ARGFYYGSWYFDY | CDR3-H22 (A22) |
| 6023 | ARSLTGLFDY | CDR3-H23 (A23) |
| 6024 | ARLGFGGFDY | CDR3-H24 (A24) |
| 6025 | ARYNYVSGSYDY | CDR3-H25 (A25) |
| 7001 | MRIFAVFIFMTYWHLLNAFTVTVPKDLYVVEYGSNMTIECKFPVEKQLDL | HUMAN PD-L1 |
| | AALIVYWEMEDKNIIQFVHGEEDLKVQHSSYRQRARLLKDQLSLGNAALQ | |
| | ITDVKLQDAGVYRCMISYGGADYKRITVKVNAPYNKINQRILVVDPVTSEH | |
| | ELTCQAEGYPKAEVIWTSSDHQVLSGKTTTTNSKREEKLFNVTSTLRINTTT | |
| | NEIFYCTFRRLDPEENHTAELVIPELPLAHPPNERTHLVILGAILLCLGVALT | |
| | FIFRLRKGRMMDVKKCGIQDTNSKKQSDTHLEET | |

TABLE 10
Table 10 provides the sequence identifiers for the light chain, heavy chain, and CDRs of the
indicated clones

| Antibody | SEQ ID NO | | | | | | | |
|---|---|---|---|---|---|---|---|---|
| Clone | Light | Heavy | CDR1 | CDR2 | CDR3 | CDR1 | CDR2 | CDR3 |
| Number | Chain | Chain | (Light) | (Light) | (Light) | (Heavy) | (Heavy) | (Heavy) |
| 1 | 8000 | 8153 | 8306 | 8459 | 8612 | 8765 | 8918 | 9071 |
| 2 | 8001 | 8154 | 8307 | 8460 | 8613 | 8766 | 8919 | 9072 |
| 3 | 8002 | 8155 | 8308 | 8461 | 8614 | 8767 | 8920 | 9073 |
| 4 | 8003 | 8156 | 8309 | 8462 | 8615 | 8768 | 8921 | 9074 |
| 5 | 8004 | 8157 | 8310 | 8463 | 8616 | 8769 | 8922 | 9075 |
| 6 | 8005 | 8158 | 8311 | 8464 | 8617 | 8770 | 8923 | 9076 |
| 7 | 8006 | 8159 | 8312 | 8465 | 8618 | 8771 | 8924 | 9077 |
| 8 | 8007 | 8160 | 8313 | 8466 | 8619 | 8772 | 8925 | 9078 |
| 9 | 8008 | 8161 | 8314 | 8467 | 8620 | 8773 | 8926 | 9079 |
| 10 | 8009 | 8162 | 8315 | 8468 | 8621 | 8774 | 8927 | 9080 |
| 11 | 8010 | 8163 | 8316 | 8469 | 8622 | 8775 | 8928 | 9081 |
| 12 | 8011 | 8164 | 8317 | 8470 | 8623 | 8776 | 8929 | 9082 |
| 13 | 8012 | 8165 | 8318 | 8471 | 8624 | 8777 | 8930 | 9083 |
| 14 | 8013 | 8166 | 8319 | 8472 | 8625 | 8778 | 8931 | 9084 |
| 15 | 8014 | 8167 | 8320 | 8473 | 8626 | 8779 | 8932 | 9085 |
| 16 | 8015 | 8168 | 8321 | 8474 | 8627 | 8780 | 8933 | 9086 |
| 17 | 8016 | 8169 | 8322 | 8475 | 8628 | 8781 | 8934 | 9087 |
| 18 | 8017 | 8170 | 8323 | 8476 | 8629 | 8782 | 8935 | 9088 |
| 19 | 8018 | 8171 | 8324 | 8477 | 8630 | 8783 | 8936 | 9089 |
| 20 | 8019 | 8172 | 8325 | 8478 | 8631 | 8784 | 8937 | 9090 |
| 21 | 8020 | 8173 | 8326 | 8479 | 8632 | 8785 | 8938 | 9091 |
| 22 | 8021 | 8174 | 8327 | 8480 | 8633 | 8786 | 8939 | 9092 |
| 23 | 8022 | 8175 | 8328 | 8481 | 8634 | 8787 | 8940 | 9093 |
| 24 | 8023 | 8176 | 8329 | 8482 | 8635 | 8788 | 8941 | 9094 |
| 25 | 8024 | 8177 | 8330 | 8483 | 8636 | 8789 | 8942 | 9095 |
| 26 | 8025 | 8178 | 8331 | 8484 | 8637 | 8790 | 8943 | 9096 |
| 27 | 8026 | 8179 | 8332 | 8485 | 8638 | 8791 | 8944 | 9097 |
| 28 | 8027 | 8180 | 8333 | 8486 | 8639 | 8792 | 8945 | 9098 |
| 29 | 8028 | 8181 | 8334 | 8487 | 8640 | 8793 | 8946 | 9099 |
| 30 | 8029 | 8182 | 8335 | 8488 | 8641 | 8794 | 8947 | 9100 |
| 31 | 8030 | 8183 | 8336 | 8489 | 8642 | 8795 | 8948 | 9101 |
| 32 | 8031 | 8184 | 8337 | 8490 | 8643 | 8796 | 8949 | 9102 |
| 33 | 8032 | 8185 | 8338 | 8491 | 8644 | 8797 | 8950 | 9103 |
| 34 | 8033 | 8186 | 8339 | 8492 | 8645 | 8798 | 8951 | 9104 |
| 35 | 8034 | 8187 | 8340 | 8493 | 8646 | 8799 | 8952 | 9105 |
| 36 | 8035 | 8188 | 8341 | 8494 | 8647 | 8800 | 8953 | 9106 |
| 37 | 8036 | 8189 | 8342 | 8495 | 8648 | 8801 | 8954 | 9107 |
| 38 | 8037 | 8190 | 8343 | 8496 | 8649 | 8802 | 8955 | 9108 |
| 39 | 8038 | 8191 | 8344 | 8497 | 8650 | 8803 | 8956 | 9109 |
| 40 | 8039 | 8192 | 8345 | 8498 | 8651 | 8804 | 8957 | 9110 |
| 41 | 8040 | 8193 | 8346 | 8499 | 8652 | 8805 | 8958 | 9111 |
| 42 | 8041 | 8194 | 8347 | 8500 | 8653 | 8806 | 8959 | 9112 |
| 43 | 8042 | 8195 | 8348 | 8501 | 8654 | 8807 | 8960 | 9113 |
| 44 | 8043 | 8196 | 8349 | 8502 | 8655 | 8808 | 8961 | 9114 |
| 45 | 8044 | 8197 | 8350 | 8503 | 8656 | 8809 | 8962 | 9115 |
| 46 | 8045 | 8198 | 8351 | 8504 | 8657 | 8810 | 8963 | 9116 |
| 47 | 8046 | 8199 | 8352 | 8505 | 8658 | 8811 | 8964 | 9117 |
| 48 | 8047 | 8200 | 8353 | 8506 | 8659 | 8812 | 8965 | 9118 |
| 49 | 8048 | 8201 | 8354 | 8507 | 8660 | 8813 | 8966 | 9119 |
| 50 | 8049 | 8202 | 8355 | 8508 | 8661 | 8814 | 8967 | 9120 |
| 51 | 8050 | 8203 | 8356 | 8509 | 8662 | 8815 | 8968 | 9121 |
| 52 | 8051 | 8204 | 8357 | 8510 | 8663 | 8816 | 8969 | 9122 |
| 53 | 8052 | 8205 | 8358 | 8511 | 8664 | 8817 | 8970 | 9123 |
| 54 | 8053 | 8206 | 8359 | 8512 | 8665 | 8818 | 8971 | 9124 |
| 55 | 8054 | 8207 | 8360 | 8513 | 8666 | 8819 | 8972 | 9125 |
| 56 | 8055 | 8208 | 8361 | 8514 | 8667 | 8820 | 8973 | 9126 |
| 57 | 8056 | 8209 | 8362 | 8515 | 8668 | 8821 | 8974 | 9127 |
| 58 | 8057 | 8210 | 8363 | 8516 | 8669 | 8822 | 8975 | 9128 |
| 59 | 8058 | 8211 | 8364 | 8517 | 8670 | 8823 | 8976 | 9129 |
| 60 | 8059 | 8212 | 8365 | 8518 | 8671 | 8824 | 8977 | 9130 |
| 61 | 8060 | 8213 | 8366 | 8519 | 8672 | 8825 | 8978 | 9131 |
| 62 | 8061 | 8214 | 8367 | 8520 | 8673 | 8826 | 8979 | 9132 |
| 63 | 8062 | 8215 | 8368 | 8521 | 8674 | 8827 | 8980 | 9133 |
| 64 | 8063 | 8216 | 8369 | 8522 | 8675 | 8828 | 8981 | 9134 |
| 65 | 8064 | 8217 | 8370 | 8523 | 8676 | 8829 | 8982 | 9135 |
| 66 | 8065 | 8218 | 8371 | 8524 | 8677 | 8830 | 8983 | 9136 |
| 67 | 8066 | 8219 | 8372 | 8525 | 8678 | 8831 | 8984 | 9137 |
| 68 | 8067 | 8220 | 8373 | 8526 | 8679 | 8832 | 8985 | 9138 |
| 69 | 8068 | 8221 | 8374 | 8527 | 8680 | 8833 | 8986 | 9139 |
| 70 | 8069 | 8222 | 8375 | 8528 | 8681 | 8834 | 8987 | 9140 |
| 71 | 8070 | 8223 | 8376 | 8529 | 8682 | 8835 | 8988 | 9141 |
| 72 | 8071 | 8224 | 8377 | 8530 | 8683 | 8836 | 8989 | 9142 |
| 73 | 8072 | 8225 | 8378 | 8531 | 8684 | 8837 | 8990 | 9143 |
| 74 | 8073 | 8226 | 8379 | 8532 | 8685 | 8838 | 8991 | 9144 |
| 75 | 8074 | 8227 | 8380 | 8533 | 8686 | 8839 | 8992 | 9145 |
| 76 | 8075 | 8228 | 8381 | 8534 | 8687 | 8840 | 8993 | 9146 |
| 77 | 8076 | 8229 | 8382 | 8535 | 8688 | 8841 | 8994 | 9147 |
| 78 | 8077 | 8230 | 8383 | 8536 | 8689 | 8842 | 8995 | 9148 |
| 79 | 8078 | 8231 | 8384 | 8537 | 8690 | 8843 | 8996 | 9149 |
| 80 | 8079 | 8232 | 8385 | 8538 | 8691 | 8844 | 8997 | 9150 |
| 81 | 8080 | 8233 | 8386 | 8539 | 8692 | 8845 | 8998 | 9151 |
| 82 | 8081 | 8234 | 8387 | 8540 | 8693 | 8846 | 8999 | 9152 |
| 83 | 8082 | 8235 | 8388 | 8541 | 8694 | 8847 | 9000 | 9153 |
| 84 | 8083 | 8236 | 8389 | 8542 | 8695 | 8848 | 9001 | 9154 |
| 85 | 8084 | 8237 | 8390 | 8543 | 8696 | 8849 | 9002 | 9155 |
| 86 | 8085 | 8238 | 8391 | 8544 | 8697 | 8850 | 9003 | 9156 |
| 87 | 8086 | 8239 | 8392 | 8545 | 8698 | 8851 | 9004 | 9157 |
| 88 | 8087 | 8240 | 8393 | 8546 | 8699 | 8852 | 9005 | 9158 |
| 89 | 8088 | 8241 | 8394 | 8547 | 8700 | 8853 | 9006 | 9159 |
| 90 | 8089 | 8242 | 8395 | 8548 | 8701 | 8854 | 9007 | 9160 |
| 91 | 8090 | 8243 | 8396 | 8549 | 8702 | 8855 | 9008 | 9161 |
| 92 | 8091 | 8244 | 8397 | 8550 | 8703 | 8856 | 9009 | 9162 |
| 93 | 8092 | 8245 | 8398 | 8551 | 8704 | 8857 | 9010 | 9163 |
| 94 | 8093 | 8246 | 8399 | 8552 | 8705 | 8858 | 9011 | 9164 |
| 95 | 8094 | 8247 | 8400 | 8553 | 8706 | 8859 | 9012 | 9165 |
| 96 | 8095 | 8248 | 8401 | 8554 | 8707 | 8860 | 9013 | 9166 |
| 97 | 8096 | 8249 | 8402 | 8555 | 8708 | 8861 | 9014 | 9167 |
| 98 | 8097 | 8250 | 8403 | 8556 | 8709 | 8862 | 9015 | 9168 |
| 99 | 8098 | 8251 | 8404 | 8557 | 8710 | 8863 | 9016 | 9169 |
| 100 | 8099 | 8252 | 8405 | 8558 | 8711 | 8864 | 9017 | 9170 |
| 101 | 8100 | 8253 | 8406 | 8559 | 8712 | 8865 | 9018 | 9171 |
| 102 | 8101 | 8254 | 8407 | 8560 | 8713 | 8866 | 9019 | 9172 |
| 103 | 8102 | 8255 | 8408 | 8561 | 8714 | 8867 | 9020 | 9173 |
| 104 | 8103 | 8256 | 8409 | 8562 | 8715 | 8868 | 9021 | 9174 |
| 105 | 8104 | 8257 | 8410 | 8563 | 8716 | 8869 | 9022 | 9175 |
| 106 | 8105 | 8258 | 8411 | 8564 | 8717 | 8870 | 9023 | 9176 |
| 107 | 8106 | 8259 | 8412 | 8565 | 8718 | 8871 | 9024 | 9177 |
| 108 | 8107 | 8260 | 8413 | 8566 | 8719 | 8872 | 9025 | 9178 |
| 109 | 8108 | 8261 | 8414 | 8567 | 8720 | 8873 | 9026 | 9179 |
| 110 | 8109 | 8262 | 8415 | 8568 | 8721 | 8874 | 9027 | 9180 |
| 111 | 8110 | 8263 | 8416 | 8569 | 8722 | 8875 | 9028 | 9181 |
| 112 | 8111 | 8264 | 8417 | 8570 | 8723 | 8876 | 9029 | 9182 |
| 113 | 8112 | 8265 | 8418 | 8571 | 8724 | 8877 | 9030 | 9183 |
| 114 | 8113 | 8266 | 8419 | 8572 | 8725 | 8878 | 9031 | 9184 |
| 115 | 8114 | 8267 | 8420 | 8573 | 8726 | 8879 | 9032 | 9185 |
| 116 | 8115 | 8268 | 8421 | 8574 | 8727 | 8880 | 9033 | 9186 |
| 117 | 8116 | 8269 | 8422 | 8575 | 8728 | 8881 | 9034 | 9187 |
| 118 | 8117 | 8270 | 8423 | 8576 | 8729 | 8882 | 9035 | 9188 |
| 119 | 8118 | 8271 | 8424 | 8577 | 8730 | 8883 | 9036 | 9189 |
| 120 | 8119 | 8272 | 8425 | 8578 | 8731 | 8884 | 9037 | 9190 |
| 121 | 8120 | 8273 | 8426 | 8579 | 8732 | 8885 | 9038 | 9191 |
| 122 | 8121 | 8274 | 8427 | 8580 | 8733 | 8886 | 9039 | 9192 |
| 123 | 8122 | 8275 | 8428 | 8581 | 8734 | 8887 | 9040 | 9193 |
| 124 | 8123 | 8276 | 8429 | 8582 | 8735 | 8888 | 9041 | 9194 |
| 125 | 8124 | 8277 | 8430 | 8583 | 8736 | 8889 | 9042 | 9195 |
| 126 | 8125 | 8278 | 8431 | 8584 | 8737 | 8890 | 9043 | 9196 |
| 127 | 8126 | 8279 | 8432 | 8585 | 8738 | 8891 | 9044 | 9197 |
| 128 | 8127 | 8280 | 8433 | 8586 | 8739 | 8892 | 9045 | 9198 |
| 129 | 8128 | 8281 | 8434 | 8587 | 8740 | 8893 | 9046 | 9199 |
| 130 | 8129 | 8282 | 8435 | 8588 | 8741 | 8894 | 9047 | 9200 |
| 131 | 8130 | 8283 | 8436 | 8589 | 8742 | 8895 | 9048 | 9201 |
| 132 | 8131 | 8284 | 8437 | 8590 | 8743 | 8896 | 9049 | 9202 |
| 133 | 8132 | 8285 | 8438 | 8591 | 8744 | 8897 | 9050 | 9203 |
| 134 | 8133 | 8286 | 8439 | 8592 | 8745 | 8898 | 9051 | 9204 |
| 135 | 8134 | 8287 | 8440 | 8593 | 8746 | 8899 | 9052 | 9205 |
| 136 | 8135 | 8288 | 8441 | 8594 | 8747 | 8900 | 9053 | 9206 |
| 137 | 8136 | 8289 | 8442 | 8595 | 8748 | 8901 | 9054 | 9207 |
| 138 | 8137 | 8290 | 8443 | 8596 | 8749 | 8902 | 9055 | 9208 |
| 139 | 8138 | 8291 | 8444 | 8597 | 8750 | 8903 | 9056 | 9209 |
| 140 | 8139 | 8292 | 8445 | 8598 | 8751 | 8904 | 9057 | 9210 |
| 141 | 8140 | 8293 | 8446 | 8599 | 8752 | 8905 | 9058 | 9211 |
| 142 | 8141 | 8294 | 8447 | 8600 | 8753 | 8906 | 9059 | 9212 |
| 143 | 8142 | 8295 | 8448 | 8601 | 8754 | 8907 | 9060 | 9213 |
| 144 | 8143 | 8296 | 8449 | 8602 | 8755 | 8908 | 9061 | 9214 |
| 145 | 8144 | 8297 | 8450 | 8603 | 8756 | 8909 | 9062 | 9215 |
| 146 | 8145 | 8298 | 8451 | 8604 | 8757 | 8910 | 9063 | 9216 |
| 147 | 8146 | 8299 | 8452 | 8605 | 8758 | 8911 | 9064 | 9217 |
| 148 | 8147 | 8300 | 8453 | 8606 | 8759 | 8912 | 9065 | 9218 |
| 149 | 8148 | 8301 | 8454 | 8607 | 8760 | 8913 | 9066 | 9219 |
| 150 | 8149 | 8302 | 8455 | 8608 | 8761 | 8914 | 9067 | 9220 |
| 151 | 8150 | 8303 | 8456 | 8609 | 8762 | 8915 | 9068 | 9221 |
| 152 | 8151 | 8304 | 8457 | 8610 | 8763 | 8916 | 9069 | 9222 |
| 153 | 8152 | 8305 | 8458 | 8611 | 8764 | 8917 | 9070 | 9223 |

What is claimed is:

1. An isolated antigen binding protein (ABP) that specifically binds a human programmed death-ligand 1 (PD-L1), comprising:
(a) a CDR3-L having a sequence selected from SEQ ID NOS: 3001-3025 and a CDR3-H having a sequence selected from SEQ ID NOS: 6001-6025; or
(b) a CDR3-L having a sequence selected from SEQ ID NOS: 8612-8764 and a CDR3-H having a sequence selected from SEQ ID NOS: 9071-9223; or
(c) a CDR3-L having a sequence of the CD3-L of any one of the clones in the library deposited under ATCC Accession No. PTA-125513 and a CDR3-L having a sequence of the CD3-L of any one of the clones in the library deposited under ATCC Accession No. PTA-125513.

2. The ABP of claim 1, wherein the CDR3-L and the CDR3-H are a cognate pair.

3. The ABP of claim 1, comprising
(a) a CDR1-L having a sequence selected from SEQ ID NOS: 1001-1025 and a CDR2-L having a sequence selected from SEQ ID NOS: 2001-2025; and a CDR1-H having a sequence selected from SEQ ID NOS: 4001-4025; and a CDR2-H having a sequence selected from SEQ ID NOS: 5001-5025; or
(b) a CDR1-L having a sequence selected from SEQ ID NOS: 8306-8458; and a CDR2-L having a sequence selected from SEQ ID NOS: 8459-8611 and a CDR1-H having a sequence selected from SEQ ID NOS: 8765-8917; and a CDR2-H having a sequence selected from SEQ ID NOS: 8918-9070; or
(c) a CDR1-L having a sequence selected from a CDR1-L of any one of the clones in the library deposited under ATCC Accession No. PTA-125513; and a CDR2-L having a sequence selected from a CDR2-L of any one of the clones in the library deposited under ATCC Accession No. PTA-125513; and a CDR1-H having a sequence selected from a CDR1-H of any one of the clones in the library deposited under ATCC Accession No. PTA-125513; and a CDR2-H having a sequence selected from a CDR2-H of any one of the clones in the library deposited under ATCC Accession No. PTA-125513;

4. The ABP of claim 1, comprising a CDR1-L, a CDR2-L, a CDR3-L, a CDR1-H, a CDR2-H and a CDR3-H, wherein
the CDR1-L consists of SEQ ID NO: 1001, the CDR2-L consists of SEQ ID NO: 2001, the CDR3-L consists of SEQ ID NO: 3001, the CDR1-H consists of SEQ ID NO: 4001, the CDR2-H consists of SEQ ID NO: 5001 and the CDR3-H consists of SEQ ID NO: 6001; or
the CDR1-L consists of SEQ ID NO: 1002, CDR2-L consists of SEQ ID NO: 2002, the CDR3-L consists of SEQ ID NO: 3002, the CDR1-H consists of SEQ ID NO: 4002, the CDR2-H consists of SEQ ID NO: 5002 and the CDR3-H consists of SEQ ID NO: 6002; or
the CDR1-L consists of SEQ ID NO: 1003, the CDR2-L consists of SEQ ID NO: 2003, the CDR3-L consists of SEQ ID NO: 3003, the CDR1-H consists of SEQ ID NO: 4003, the CDR2-H consists of SEQ ID NO: 5003 and the CDR3-H consists of SEQ ID NO: 6003; or
the CDR1-L consists of SEQ ID NO: 1004, the CDR2-L consists of SEQ ID NO: 2004, the CDR3-L consists of SEQ ID NO: 3004, the CDR1-H consists of SEQ ID NO: 4004, the CDR2-H consists of SEQ ID NO: 5004 and the CDR3-H consists of SEQ ID NO: 6004; or
the CDR1-L consists of SEQ ID NO: 1005, the CDR2-L consists of SEQ ID NO: 2005, the CDR3-L consists of SEQ ID NO: 3005, the CDR1-H consists of SEQ ID NO: 4005, the CDR2-H consists of SEQ ID NO: 5005 and the CDR3-H consists of SEQ ID NO: 6005; or
the CDR1-L consists of SEQ ID NO: 1006, the CDR2-L consists of SEQ ID NO: 2006, the CDR3-L consists of SEQ ID NO: 3006, the CDR1-H consists of SEQ ID NO: 4006, the CDR2-H consists of SEQ ID NO: 5006 and the CDR3-H consists of SEQ ID NO: 6006; or
the CDR1-L consists of SEQ ID NO: 1007, the CDR2-L consists of SEQ ID NO: 2007, the CDR3-L consists of SEQ ID NO: 3007, the CDR1-H consists of SEQ ID NO: 4007, the CDR2-H consists of SEQ ID NO: 5007 and the CDR3-H consists of SEQ ID NO: 6007; or
the CDR1-L consists of SEQ ID NO: 1008, the CDR2-L consists of SEQ ID NO: 2008, the CDR3-L consists of SEQ ID NO: 3008, the CDR1-H consists of SEQ ID NO: 4008, the CDR2-H consists of SEQ ID NO: 5008 and the CDR3-H consists of SEQ ID NO: 6008 or
the CDR1-L consists of SEQ ID NO: 1009, the CDR2-L consists of SEQ ID NO: 2009, the CDR3-L consists of SEQ ID NO: 3009, the CDR1-H consists of SEQ ID NO: 4009, the CDR2-H consists of SEQ ID NO: 5009 and the CDR3-H consists of SEQ ID NO: 6009; or
the CDR1-L consists of SEQ ID NO: 1010, the CDR2-L consists of SEQ ID NO: 2010, the CDR3-L consists of SEQ ID NO: 3010, the CDR1-H consists of SEQ ID NO: 4010, the CDR2-H consists of SEQ ID NO: 5010 and the CDR3-H consists of SEQ ID NO: 6010; or
the CDR1-L consists of SEQ ID NO: 1011, the CDR2-L consists of SEQ ID NO: 2011, the CDR3-L consists of SEQ ID NO: 3011, the CDR1-H consists of SEQ ID NO: 4011, the CDR2-H consists of SEQ ID NO: 5011 and the CDR3-H consists of SEQ ID NO: 6011; or
the CDR1-L consists of SEQ ID NO: 1012, the CDR2-L consists of SEQ ID NO: 2012, the CDR3-L consists of SEQ ID NO: 3012, the CDR1-H consists of SEQ ID NO: 4012, the CDR2-H consists of SEQ ID NO: 5012 and the CDR3-H consists of SEQ ID NO: 6012; or
the CDR1-L consists of SEQ ID NO: 1013, the CDR2-L consists of SEQ ID NO: 2013, the CDR3-L consists of SEQ ID NO: 3013, the CDR1-H consists of SEQ ID NO: 4013, the CDR2-H consists of SEQ ID NO: 5013 and the CDR3-H consists of SEQ ID NO: 6013; or
the CDR1-L consists of SEQ ID NO: 1014, the CDR2-L consists of SEQ ID NO: 2014, the CDR3-L consists of SEQ ID NO: 3014, the CDR1-H consists of SEQ ID NO: 4014, the CDR2-H consists of SEQ ID NO: 5014 and the CDR3-H consists of SEQ ID NO: 6014; or
the CDR1-L consists of SEQ ID NO: 1015, the CDR2-L consists of SEQ ID NO: 2015, the CDR3-L consists of SEQ ID NO: 3015, the CDR1-H consists of SEQ ID NO: 4015, the CDR2-H consists of SEQ ID NO: 5015 and the CDR3-H consists of SEQ ID NO: 6015; or
the CDR1-L consists of SEQ ID NO: 1016, the CDR2-L consists of SEQ ID NO: 2016, the CDR3-L consists of SEQ ID NO: 3016, the CDR1-H consists of SEQ ID NO: 4016, the CDR2-H consists of SEQ ID NO: 5016 and the CDR3-H consists of SEQ ID NO: 6016; or
the CDR1-L consists of SEQ ID NO: 1017, the CDR2-L consists of SEQ ID NO: 2017, the CDR3-L consists of SEQ ID NO: 3017, the CDR1-H consists of SEQ ID NO: 4017, the CDR2-H consists of SEQ ID NO: 5017 and the CDR3-H consists of SEQ ID NO: 6017; or
the CDR1-L consists of SEQ ID NO: 1018, the CDR2-L consists of SEQ ID NO: 2018, the CDR3-L consists of SEQ ID NO: 3018, the CDR1-H consists of SEQ ID NO: 4018, the CDR2-H consists of SEQ ID NO: 5018 and the CDR3-H consists of SEQ ID NO: 6018; or
the CDR1-L consists of SEQ ID NO: 1019, the CDR2-L consists of SEQ ID NO: 2019, the CDR3-L consists of SEQ ID NO: 3019, the CDR1-H consists of SEQ ID NO: 4019, the CDR2-H consists of SEQ ID NO: 5019 and the CDR3-H consists of SEQ ID NO: 6019; or
the CDR1-L consists of SEQ ID NO: 1020, the CDR2-L consists of SEQ ID NO: 2020, the CDR3-L consists of SEQ ID NO: 3020, the CDR1-H consists of SEQ ID NO: 4020, the CDR2-H consists of SEQ ID NO: 5020 and the CDR3-H consists of SEQ ID NO: 6020; or
the CDR1-L consists of SEQ ID NO: 1021, the CDR2-L consists of SEQ ID NO: 2021, the CDR3-L consists of SEQ ID NO: 3021, the CDR1-H consists of SEQ ID NO: 4021, the CDR2-H consists of SEQ ID NO: 5021 and the CDR3-H consists of SEQ ID NO: 6021; or
the CDR1-L consists of SEQ ID NO: 1022, the CDR2-L consists of SEQ ID NO: 2022, the CDR3-L consists of SEQ ID NO: 3022, the CDR1-H consists of SEQ ID NO: 4022, the CDR2-H consists of SEQ ID NO: 5022 and the CDR3-H consists of SEQ ID NO: 6022; or
the CDR1-L consists of SEQ ID NO: 1023, the CDR2-L consists of SEQ ID NO: 2023, the CDR3-L consists of SEQ ID NO: 3023, the CDR1-H consists of SEQ ID NO: 4023, the CDR2-H consists of SEQ ID NO: 5023 and the CDR3-H consists of SEQ ID NO: 6023; or
the CDR1-L consists of SEQ ID NO: 1024, the CDR2-L consists of SEQ ID NO: 2024, the CDR3-L consists of SEQ ID NO: 3024, the CDR1-H consists of SEQ ID NO: 4024, the CDR2-H consists of SEQ ID NO: 5024 and the CDR3-H consists of SEQ ID NO: 6024; or
the CDR1-L consists of SEQ ID NO: 1025, the CDR2-L consists of SEQ ID NO: 2025, the CDR3-L consists of SEQ ID NO: 3025, the CDR1-H consists of SEQ ID NO: 4025, the CDR2-H consists of SEQ ID NO: 5025 and the CDR3-H consists of SEQ ID NO: 6025.

5. The ABP of claim 1, comprising
a variable light chain (V_{L}) comprising a sequence at least 97% identical to a sequence selected from SEQ ID NOS: 1-25 and a variable heavy chain (V_{H}) comprising a sequence at least 97% identical to a sequence selected from SEQ ID NOS: 101-125; or
a variable light chain (V_{L}) comprising a sequence at least 97% identical to a sequence selected from SEQ ID NOS: 8000-8152 and a variable heavy chain (V_{H}) comprising a sequence at least 97% identical to a sequence selected from SEQ ID NOS: 8153-8305; or
a variable light chain (V_{L}) comprising a sequence at least 97% identical to a V_{L} sequence of any one of the clones in the library deposited under ATCC Accession No. PTA-125513 and a variable heavy chain (V_{H}) comprising a sequence at least 97% identical to a Vu sequence of any one of the clones in the library deposited under ATCC Accession No. PTA-125513.

6. The ABP of claim 5, wherein the V_{L} and the Vu are a cognate pair.

7. The ABP of claim 1, comprising
a variable light chain (V_{L}) comprising a sequence selected from SEQ ID NOS: 1-25 and a variable heavy chain (V_{H}) comprising a a sequence selected from SEQ ID NOS: 101-125 or
a variable light chain (V_{L}) comprising a sequence selected from SEQ ID NOS: 8000-8152 and a variable heavy chain (V_{H}) comprising a sequence selected from SEQ ID NOS: 8153-8305; or
a variable light chain (V_{L}) comprising a V_{L} sequence of any one of the clones in the library deposited under ATCC Accession No. PTA-125513 and a variable heavy chain (V_{H}) comprising a V_{H} sequence of any one of the clones in the library deposited under ATCC Accession No. PTA-125513.

8. The ABP of claim 7, wherein the V_{L} and the V_{H} are a cognate pair.

9. The ABP of any of claims 1-8, wherein the ABP comprises an scFv or a full length monoclonal antibody.

10. The ABP of any of claims 1-8, wherein the ABP comprises an immunoglobulin constant region.

11. The ABP of any of the above claims, wherein the ABP binds human PD-L1 with a K_{D} of less than 500 nM, as measured by bio-layer interferometry or surface plasmon resonance.

12. The ABP of claim 11, wherein the ABP binds human PD-L1 with a K_{D} of less than 200 nM, as measured by bio-layer interferometry or surface plasmon resonance.

13. The ABP of claim 12, wherein the ABP binds human PD-L1 with a K_{D} of less than 25 nM, as measured by bio-layer interferometry or surface plasmon resonance.

14. The ABP of any of claims 1-13, wherein the ABP binds to human PD-L1 on a cell surface with a K_{D} of less than 25 nM.

15. A pharmaceutical composition comprising the ABP of any of claims 1-14 and an excipient.

16. A method of treating a disease comprising the step of:
administering to a subject in need thereof an effective amount of the ABP of any of claims 1-14 or the pharmaceutical composition of claim 15.

17. The method of claim 16, wherein the disease is selected from the group consisting of cancer, AIDS, Alzheimer's disease and viral or bacterial infection.

18. The method of any of claims 16-17, further comprising the step of administering one or more additional therapeutic agents to the subject.

19. The method of claim 18, wherein the additional therapeutic agent is selected from CTLA-4 inhibitor, TIGIT inhibitor, a chemotherapy agent, an immune-stimulatory agent, radiation, a cytokine, a polynucleotide encoding a cytokine and a combination thereof.

20. An isolated polynucleotide encoding the ABP of any of claims 1-10.

21. A vector comprising the isolated polynucleotide of claim 20.

22. A host cell comprising the isolated polynucleotide of claim 20 or the vector of claim 21.

23. A method of producing an isolated antigen binding protein (ABP) that specifically binds human PD-L1, comprising:
expressing the ABP in the host cell of claim 22, and isolating the ABP.

The application's sequence listing, which the Patent Office published only in electronic form, follows.

SEQUENCE LISTING (9254 sequences)

SEQ ID NO: 1 - protein, 108 aa, Homo sapiens
EIVMTQSPATLSLSPGERATLSCWASQSVSSSYLSWYQQKPGQAPRLLIYGASTRATGIPARFSGSGSGTDFTLTISSLQPEDFAVYYCQQDYNLPYTFGQGTKLEIK

SEQ ID NO: 2 - protein, 107 aa, Homo sapiens
DIQMTQSPSSLSASVGDRVTITCRASQGISNYLAWFQQKPGKAPKSLIYAASSLQSGVPSKFSGSGSGTDFTLTISSLQPEDFATYYCQQYNSYPYTFGQGTKLEIK

SEQ ID NO: 3 - protein, 107 aa, Homo sapiens
AIQMTQSPSSLSASVGDRVTITCRASQDIRNDLGWYQQQPGKAPKLLIYAASSLQSGVPSRFSGSGSGTDFTLTISSLQPEDFATYYCLQDYNYPPTFGQGTKVEIK

SEQ ID NO: 4 - protein, 107 aa, Homo sapiens; identical to SEQ ID NO: 3

SEQ ID NO: 5 - protein, 108 aa, Homo sapiens
EIVMTQSPATLSLSPGERATLSCRASQSVSSTYLSWYQQKPGQAPRLLIFGASTRATGIPARFSGSGSGTDFTLTISSLQPEDFAVYYCQQDYNLPPTFGPGTKVDIK

SEQ ID NO: 6 - protein, 107 aa, Homo sapiens
EIVMTQSPATLSLSPGERATLSCRASQSVSSSYLSWYQQKPGQAPRLLIYGASTRATGIPARFSGSGSGTDFTLTISSLQPEDFAVYYCQQDYNLFTFGPGTKVDIK

SEQ ID NO: 7 - protein, 107 aa, Homo sapiens
EIVMTQSPTTLSLSPGERATLSCRASQSVSSSYLSWYQQKPGQAPRLLIYGASTRATGIPARFSGSGSGTDFTLTISSLQPEDFAVYYCQQDYNLRTFGQGTKVEIK

SEQ ID NO: 8 - protein, 107 aa, Homo sapiens
DIQMTQSPSSLSASVGDRVTITCRASQGIRNDLGWYQQKPGKAPKRLIYAASSLQSGVPSRFSGSGSGTEFTLTISSLQPEDFATYYCLQHNSYPYTFGQGTKLEIK

SEQ ID NO: 9 - protein, 108 aa, Homo sapiens
EIVMTQSPATLSLSPGERATLSCRASQSVSSSYLSWYQQKPGQAPRLLMYGASTRATGIPARFSGSGSGTDFTLTISSLQPEDFAVYYCQQDYNLPYTFGQGTKLEIK

SEQ ID NO: 10 - protein, 108 aa, Homo sapiens
EIVMTQSPATLSLSPGERATLSCRASQSVSSSYLSWYQQKPGQAPRLLIYGASTRATGIPARFSGSGSGTDFTLTISSLQPEDFAVYYCQQDYNLPHTFGQGTKLEIK

SEQ ID NO: 11 - protein, 107 aa, Homo sapiens
AIQMTQSPSSLSASVGDRVTITCRASQGIRNDLGWYQQKPGKAPKLLIYAASSLQSGVPSRFSGSGSGTDFTLTISSLQPEDFATYYCLQDYNYPYTFGQGTKLEIK

SEQ ID NO: 12 - protein, 107 aa, Homo sapiens
DIQMTQSPSSLSASVGDRVTITCRASQGIRNDLGWYQQKPGKAPKRLIYAASSLQSGVPSRFSGSGSGTEFTLTISSLQPEDFATYYCLQHNSYPRTFGQGTKVEIK

SEQ ID NO: 13 - protein, 107 aa, Homo sapiens
EIVMTQSPATLSLSPGERATLSCRASQSVSSSYLSWYQQKPGQAPRLLIYGASTRATGIPARFSGSGSGTDFTLTISSLQPEDFAVYYCQQDYNLITFGQGTRLEIK

SEQ ID NO: 14 - protein, 108 aa, Homo sapiens; identical to SEQ ID NO: 10

SEQ ID NO: 15 - protein, 107 aa, Homo sapiens
DIQMTQSPSSLSASVGDRVTITCRASQGIRNDLGWYQQKPGKAPKRLIYAASSLQSGVPSRFSGSGSGTEFTLTISSLQPEDFATYYCLQHDSYPLTFGGGTKVEIK

SEQ ID NO: 16 - protein, 107 aa, Homo sapiens; identical to SEQ ID NO: 12

SEQ ID NO: 17 - protein, 107 aa, Homo sapiens
DIQMTQSPSSLSASVGDRVTITCRASQGIRNDLGWYQQKPGKAPKRLIYAASSLQSGVPSRFSGSGSGTEFTLTISSLQPEDFATYYCLQHNTYPWTFGQGTKVEIK

SEQ ID NO: 18 - protein, 107 aa, Homo sapiens
EIVMTQSPATLSVSPGERATLSCRASQSVSSNLAWYQQKPGQAPRLLIYGASTRATGIPARFSGSGSGTEFTLTISSLQSEDFAVYYCQQYNNWPYTFGQGTKLEIK

SEQ ID NO: 19 - protein, 107 aa, Homo sapiens
DIQLTQSPSFLSASVGDRVTITCRASQGISSYLAWYQQKPGKAPKLLIYDASTLQSGVPSRFSGSGSGTEFTLTISSLQPEDFAIYYCQQLNTYPLTFGGGTKVEIK

SEQ ID NO: 20 - protein, 107 aa, Homo sapiens; identical to SEQ ID NO: 8

SEQ ID NO: 21 - protein, 107 aa, Homo sapiens
DIQLTQSPPFLSASVGDRVTITCRASQGISSYLAWYQQKPGKAPKLLIYAASTLQSGVPSRFSGSGSGTEFTLTISSLQPEDFATYYCQQLNSYPFTFGQGTKLEIK

SEQ ID NO: 22 - protein, 107 aa, Homo sapiens
DIQMTQSPSSLSASVGDRVTITCRASQGISSWLAWYQQKPEKAPKSLIYAASSLQSGVPSRFSGSGSGTDFTLTISSLQPEDFATYYCQQYNSYPPTVGGGTKVEIK

SEQ ID NO: 23 - protein, 108 aa, Homo sapiens
DIQMTQSPSSLSASVGDRVTITCRASQGIRNDLGWYQQKPGKAPKRLIYAASSLQSGVPSRFSGSGSGTEFTLTISSLQPEDFATYYCLQHNSYPMFTFGQGTKLEIK

SEQ ID NO: 24 - protein, 107 aa, Homo sapiens
EIVMTQSPATLSLSPGERATLSCRASQSVSSSHLSWYQQKPGQAPRLLIYGASTRATGIPARFSGSGSGTDFTLTISSLQPEDFAVYYCQQDYNLLTFGGGTKVEIK

SEQ ID NO: 25 - protein, 108 aa, Homo sapiens
EIVMTQSPATLSLSPGERATLSCWASQSVSSSYLSWYQQKPGQAPRLLIYGASTRATGIPARFSGSGSGTDFTLTISSLQPEDFAVYYCQQDYYLPYTFGQGTKLEIK

SEQ ID NO: 26-100 - skipped (75 entries)

SEQ ID NO: 101 - protein, 120 aa, Homo sapiens
QVQLVQSGAEVKKPGASVKVSCKASGFTFTSYDINWVRQATGQGLEWMGWMHPNSGITGYAQKFQGRVTMTRNTSISTAYMELSSLSSEDTAVYFCARYYYVSGSYDYWGQGTLVTVSSA

SEQ ID NO: 102 - protein, 122 aa, Homo sapiens
EVQLVESGGGLVQPGGSLRLSCAASGFTFSRYDMSWVRQAPGKGLEWVSTISGSGGSTYYADSVKGRFTISRDNSKTTLYLQMISLRAEDTAVYYCAKAGFTMIVVAFDYWGQGTLVTVSSA

SEQ ID NO: 103 - protein, 119 aa, Homo sapiens
QVQLVESGGGVVQPGRSLRLSCAASGFTFSNYGMHWVRQAPGKGLEWVAVIWFDGNTKYYTDSVKGRFTISRDNSKNTLYLQMNSLRAEDTAVYYCARDTTMVPMDVWGQGTTATVSSA

SEQ ID NO: 104 - protein, 119 aa, Homo sapiens
QVQLVESGGGVVQPGRSLRLSCAASGFTFSNYGMHWVRQAPGKGLEWVAVIWFDGNTKYYTDSVKGRFTISRDNSKNTLYLQMNSLRAEDTAVYYCARDITMVPMDVWGQGTTVTVSSA

SEQ ID NO: 105 - protein, 119 aa, Homo sapiens
QVQLVESGGGVVQPGRSLRLSCAASGFAFSSYGMHWVRQAPGKGLEWVALIWFDGNNKFYADSVKGRFTISRDNSKNTLYLQMNSLRAEDTAVYYCARDTTAASFDYWGQGTLVTVSSA

SEQ ID NO: 106 - protein, 119 aa, Homo sapiens
QVQLVESGGGVVQPGRSLRLSCAASGFTFSSYGMHWVRQAPGKGLEWVAVIWFDGSNKYYADSVKGRFTISRDNSKNTLYLQMNSLRAEDTAVYYCARDKTVSPFDIWGQGTMVTVSSA

SEQ ID NO: 107 - protein, 119 aa, Homo sapiens
QVQLQESGPGLVKPSETLSLTCTVSGGSISSYYWSWIRQPPGKGLEWIGYIFYSGSTNYNPSLKSRVTISVDTSKNQFSLKLSSVTAADTAVYFCARDNWHDGGVDYWGQGTLVTVSSA

SEQ ID NO: 108 - protein, 127 aa, Homo sapiens
QVQLVQSGAEVKKPGASVKVSCKASGYTFTSYGISWVRQAPGQGLEWMGWISAYNGSTNYAQKLQGRVTMTTDTSTSTAYMELRSLRSDDTAVFYCARDDRIAVADYYYYFGMDVWGQGTTVTVSSA

SEQ ID NO: 109 - protein, 119 aa, Homo sapiens
QVQLVESGGGVVQPGRSLRLSCAASGFTFSSYGMHWVRQAPGKGLEWVAVIWFDGNNKYYADSVKGRFTISRDNSKNTLYLQMNSLRAEDTAVYYCARDVTTVPFDYWGQGTLVTVSSA

SEQ ID NO: 110 - protein, 119 aa, Homo sapiens
QVQLVESGGGVVQPGRSLRLSCAASGFTFSSYGMHWVRQAPGKGLEWVAVIWYDGINKYYADSVKGRFTISRDNSKNTLYLQMNSLRAEDTAVYYCARDSTASPFDYWGQGTLVTVSSA

SEQ ID NO: 111 - protein, 118 aa, Homo sapiens
QVQLVESGGGVVQPGRSLRLSCAASGFTFSSYGIHWVRQAPGKGLEWVAVIWSDGSNKFYADSVKGRFTISRDNSKNTLFLQMSSLRAEDTAVYYCARDIAAAIDYWGQGTLVTVSSA

SEQ ID NO: 112 - protein, 119 aa, Homo sapiens
QVQLVESGGGVVQPGRSLRLSCAASGFTFSSYGMHWVRQAPGKGLEWVAVIWYDGSNKSYADSVKGRFTFSRDNSKNTLYLQMNSLRAEDTAVYYCARDMDYFGLDVWGQGTTVTVSSA

SEQ ID NO: 113 - protein, 118 aa, Homo sapiens
QVQLQESGPGLVKPSETLSLTCTVSGGSISSYYWSWIRQPPGKGLEWIGYIHYSGSTKYNPSLKSRVTISLDTSKNQFSLKLSSVTAADTAVYYCARDRGIGAFDIWGQGTMVTVSSA

SEQ ID NO: 114 - protein, 119 aa, Homo sapiens
QVQLVESGGGVVQPGRSLRLSCAASGFTFSSYGMHWVRQAPGKGLEWVAVIWYDGSVKYYADSVKGRFTISRDNSKNTLYLQMNSLRAEDTAVYYCARDRTGVPFDYWGQGTLVTVSSA

SEQ ID NO: 115 - protein, 131 aa, Homo sapiens
QLQLQESGPGLVKPSETLSLTCTVSGGSFNRSNYYWGWIRQPPGKGLEWIGSIYYSGSTYYNPSLKSRLTISADTSKTQFSLKRNSVTAADTAVYYCAREDIVVVPAAQPPHFYFGMDVWGQGTTVTVSSA

SEQ ID NO: 116 - protein, 119 aa, Homo sapiens
QVQLVESGGGVVQPGRSLRLSCAASGFTFSSYGMHWVRQAPGKGLEWVAVIWYDGSNKYYADSVKGRFTISRDNSNDTLFLQMNSLRAEDTAVYYCARDFDWFGMDVWGQGTTVTVSSA

SEQ ID NO: 117 - protein, 126 aa, Homo sapiens
QVQLQESGPGLVKPSETLSLTCTVSGGSISGYSWSWIRQPPGKGLEWIGYIYYSGSTNNNPSLKSRVTISVDTSKNQFSLKLSSVTAADTAVYFCARDDGIAVAGYYFYYGLDVWGQGTTVTVSSA

SEQ ID NO: 118 - protein, 121 aa, Homo sapiens
QVQLVESGGGVVQPGRSLRLSCAASGFTFSSFALHWVRQAPGKGLEWVAVLWYDGISKYYADSVKGRFTISRDNSKNTLYLQMNSLRAEDTAVYYCARDVVGVHDAFDIWGQGTMVTVSSA

SEQ ID NO: 119 - protein, 127 aa, Homo sapiens
QVQLVESGGGVVQPGRSLRLSCVASGFTFSSYGMHWVRQAPGKGLEWVAVIWYDGSNKFYIDSVKGRFTISRDNSKNTLYLQMNSLRAEDTAVYYCARGGAVAGTSWYYYYGMDVWGQGTTVTVSSA

SEQ ID NO: 120 - protein, 126 aa, Homo sapiens
QVQLQESGPGLVKPSETLSLTCTVSGGSISSYYWSWIRQPPGKGLEWIGYIYYSGSTNYNPSLKSRVTISVDTSKNQFSLKLSSVTAADTAVYYCARDDRIAVGPYYYYYGMDVWGQGTTVTVSSA

SEQ ID NO: 121 - protein, 127 aa, Homo sapiens
QVQLVESGGGVVQPGRSLRLSCAASGFTFSSYGMHWVRQAPGKGLEWVAVIWYDGSNKFYEDSVKGRFTISRDNSKNTLYLQMNSLRAEDTAVYYCARGGVNWNDVGYYYYGMDVWGQGTTVTVSSA

SEQ ID NO: 122 - protein, 121 aa, Homo sapiens
QVQLVQSGAEVKKPGASVKVSCKASGYTFTSYGISWVRQAPGQGLEWMGWISAYNGNTNYAQKLQGRVTMTTDTSTSTAYMELRSLRSDDTAVYYCARGFYYGSWYFDYWGQGTLVTVSSA

SEQ ID NO: 123 - protein, 118 aa, Homo sapiens
QVQLVQSGAEVKKPGASVKVSCKASGYTFTNYGISWVRQAPGQGLEWMGWISAYNGNTNYEQKVQGRVTMTTDTSTSTAYMELRSLRSDDTAVYYCARSLTGLFDYWGQGTLVTVSSA

SEQ ID NO: 124 - protein, 119 aa, Homo sapiens
QLQLQESGPGLVKPSETLSLTCTVSGGSISNSSSFWGWIRQPPGKGLEWIGSIYYSGSTYYNPSLKSRVTMSVDTPKTQSSRKRSSVPAADTAVYYCARLGFGGFDYWGQGTLVTVSSA

SEQ ID NO: 125 - protein, 120 aa, Homo sapiens
QVQLVQSGAEVKKPGASVKVSCKASGFTFTSYDINWVRQATGQGLEWMGWMHPKSGITGYAQKFQGRVTMTRNTSISTAYMELSNLSSEDTAVYFCARYNYVSGSYDYWGQGTLVTVSSA

SEQ ID NO: 126-1000 - skipped (875 entries)

SEQ ID NO: 1001 - protein, 7 aa, Homo sapiens
QSVSSSY

SEQ ID NO: 1002 - protein, 6 aa, Homo sapiens
QGISNY

SEQ ID NO: 1003 - protein, 6 aa, Homo sapiens
QDIRND

SEQ ID NO: 1004 - protein, 6 aa, Homo sapiens
QDIRND

SEQ ID NO: 1005 - protein, 7 aa, Homo sapiens
QSVSSTY

SEQ ID NO: 1006 - protein, 7 aa, Homo sapiens
QSVSSSY

SEQ ID NO: 1007 - protein, 7 aa, Homo sapiens
QSVSSSY

SEQ ID NO: 1008 - protein, 6 aa, Homo sapiens
QGIRND

SEQ ID NO: 1009 - protein, 7 aa, Homo sapiens
QSVSSSY

SEQ ID NO: 1010 - protein, 7 aa, Homo sapiens
QSVSSSY

SEQ ID NO: 1011 - protein, 6 aa, Homo sapiens
QGIRND

SEQ ID NO: 1012 - protein, 6 aa, Homo sapiens
QGIRND

SEQ ID NO: 1013 - protein, 7 aa, Homo sapiens
QSVSSSY

SEQ ID NO: 1014 - protein, 7 aa, Homo sapiens
QSVSSSY

SEQ ID NO: 1015 - protein, 6 aa, Homo sapiens
QGIRND

SEQ ID NO: 1016 - protein, 6 aa, Homo sapiens
QGIRND

SEQ ID NO: 1017 - protein, 6 aa, Homo sapiens
QGIRND

SEQ ID NO: 1018 - protein, 6 aa, Homo sapiens
QSVSSN

SEQ ID NO: 1019 - protein, 6 aa, Homo sapiens
QGISSY

SEQ ID NO: 1020 - protein, 6 aa, Homo sapiens
QGIRND

SEQ ID NO: 1021 - protein, 6 aa, Homo sapiens
QGISSY

SEQ ID NO: 1022 - protein, 6 aa, Homo sapiens
QGISSW

SEQ ID NO: 1023 - protein, 6 aa, Homo sapiens
QGIRND

SEQ ID NO: 1024 - protein, 7 aa, Homo sapiens
QSVSSSH

SEQ ID NO: 1025 - protein, 7 aa, Homo sapiens
QSVSSSY

SEQ ID NO: 1026-2000 - skipped (975 entries)

SEQ ID NO: 2001 - protein, 3 aa, Homo sapiens
GAS

SEQ ID NO: 2002 - protein, 3 aa, Homo sapiens
AAS

SEQ ID NO: 2003 - protein, 3 aa, Homo sapiens
AAS

SEQ ID NO: 2004 - protein, 3 aa, Homo sapiens
AAS

SEQ ID NO: 2005 - protein, 3 aa, Homo sapiens
GAS

SEQ ID NO: 2006 - protein, 3 aa, Homo sapiens
GAS

SEQ ID NO: 2007 - protein, 3 aa, Homo sapiens
GAS

SEQ ID NO: 2008 - protein, 3 aa, Homo sapiens
AAS

SEQ ID NO: 2009 - protein, 3 aa, Homo sapiens
GAS

SEQ ID NO: 2010 - protein, 3 aa, Homo sapiens
GAS

SEQ ID NO: 2011 - protein, 3 aa, Homo sapiens
AAS

SEQ ID NO: 2012 - protein, 3 aa, Homo sapiens
AAS

SEQ ID NO: 2013 - protein, 3 aa, Homo sapiens
GAS

SEQ ID NO: 2014 - protein, 3 aa, Homo sapiens
GAS

SEQ ID NO: 2015 - protein, 3 aa, Homo sapiens
AAS

SEQ ID NO: 2016 - protein, 3 aa, Homo sapiens
AAS

SEQ ID NO: 2017 - protein, 3 aa, Homo sapiens
AAS

SEQ ID NO: 2018 - protein, 3 aa, Homo sapiens
GAS

SEQ ID NO: 2019 - protein, 3 aa, Homo sapiens
DAS

SEQ ID NO: 2020 - protein, 3 aa, Homo sapiens
AAS

SEQ ID NO: 2021 - protein, 3 aa, Homo sapiens
AAS

SEQ ID NO: 2022 - protein, 3 aa, Homo sapiens
AAS

SEQ ID NO: 2023 - protein, 3 aa, Homo sapiens
AAS

SEQ ID NO: 2024 - protein, 3 aa, Homo sapiens
GAS

SEQ ID NO: 2025 - protein, 3 aa, Homo sapiens
GAS

SEQ ID NO: 2026-3000 - skipped (975 entries)

SEQ ID NO: 3001 - protein, 9 aa, Homo sapiens
QQDYNLPYT

SEQ ID NO: 3002 - protein, 9 aa, Homo sapiens
QQYNSYPYT

SEQ ID NO: 3003 - protein, 9 aa, Homo sapiens
LQDYNYPPT

SEQ ID NO: 3004 - protein, 9 aa, Homo sapiens
LQDYNYPPT

SEQ ID NO: 3005 - protein, 9 aa, Homo sapiens
QQDYNLPPT

SEQ ID NO: 3006 - protein, 8 aa, Homo sapiens
QQDYNLFT

SEQ ID NO: 3007 - protein, 8 aa, Homo sapiens
QQDYNLRT

SEQ ID NO: 3008 - protein, 9 aa, Homo sapiens
LQHNSYPYT

SEQ ID NO: 3009 - protein, 9 aa, Homo sapiens
QQDYNLPYT

SEQ ID NO: 3010 - protein, 9 aa, Homo sapiens
QQDYNLPHT

SEQ ID NO: 3011 - protein, 9 aa, Homo sapiens
LQDYNYPYT

SEQ ID NO: 3012 - protein, 9 aa, Homo sapiens
LQHNSYPRT

SEQ ID NO: 3013 - protein, 8 aa, Homo sapiens
QQDYNLIT

SEQ ID NO: 3014 - protein, 9 aa, Homo sapiens
QQDYNLPHT

SEQ ID NO: 3015 - protein, 9 aa, Homo sapiens
LQHDSYPLT

SEQ ID NO: 3016 - protein, 9 aa, Homo sapiens
LQHNSYPRT

SEQ ID NO: 3017 - protein, 9 aa, Homo sapiens
LQHNTYPWT

SEQ ID NO: 3018 - protein, 9 aa, Homo sapiens
QQYNNWPYT

SEQ ID NO: 3019 - protein, 9 aa, Homo sapiens
QQLNTYPLT

SEQ ID NO: 3020 - protein, 9 aa, Homo sapiens
LQHNSYPYT

SEQ ID NO: 3021 - protein, 9 aa, Homo sapiens
QQLNSYPFT

SEQ ID NO: 3022 - protein, 9 aa, Homo sapiens
QQYNSYPPT

SEQ ID NO: 3023 - protein, 10 aa, Homo sapiens
LQHNSYPMFT

SEQ ID NO: 3024 - protein, 8 aa, Homo sapiens
QQDYNLLT

SEQ ID NO: 3025 - protein, 9 aa, Homo sapiens
QQDYYLPYT

SEQ ID NO: 3026-4000 - skipped (975 entries)

SEQ ID NO: 4001 - protein, 8 aa, Homo sapiens
GFTFTSYD

SEQ ID NO: 4002 - protein, 8 aa, Homo sapiens
GFTFSRYD

SEQ ID NO: 4003 - protein, 8 aa, Homo sapiens
GFTFSNYG

SEQ ID NO: 4004 - protein, 8 aa, Homo sapiens
GFTFSNYG

SEQ ID NO: 4005 - protein, 8 aa, Homo sapiens
GFAFSSYG

SEQ ID NO: 4006 - protein, 8 aa, Homo sapiens
GFTFSSYG

SEQ ID NO: 4007 - protein, 8 aa, Homo sapiens
GGSISSYY

SEQ ID NO: 4008 - protein, 8 aa, Homo sapiens
GYTFTSYG

SEQ ID NO: 4009 - protein, 8 aa, Homo sapiens
GFTFSSYG

SEQ ID NO: 4010 - protein, 8 aa, Homo sapiens
GFTFSSYG

SEQ ID NO: 4011 - protein, 8 aa, Homo sapiens
GFTFSSYG

SEQ ID NO: 4012 - protein, 8 aa, Homo sapiens
GFTFSSYG

SEQ ID NO: 4013 - protein, 8 aa, Homo sapiens
GGSISSYY

SEQ ID NO: 4014 - protein, 8 aa, Homo sapiens
GFTFSSYG

SEQ ID NO: 4015 - protein, 10 aa, Homo sapiens
GGSFNRSNYY

SEQ ID NO: 4016 - protein, 8 aa, Homo sapiens
GFTFSSYG

SEQ ID NO: 4017 - protein, 8 aa, Homo sapiens
GGSISGYS

SEQ ID NO: 4018 - protein, 8 aa, Homo sapiens
GFTFSSFA

SEQ ID NO: 4019 - protein, 8 aa, Homo sapiens
GFTFSSYG

SEQ ID NO: 4020 - protein, 8 aa, Homo sapiens
GGSISSYY

SEQ ID NO: 4021 - protein, 8 aa, Homo sapiens
GFTFSSYG

SEQ ID NO: 4022 - protein, 8 aa, Homo sapiens
GYTFTSYG

SEQ ID NO: 4023 - protein, 8 aa, Homo sapiens
GYTFTNYG

SEQ ID NO: 4024 - protein, 10 aa, Homo sapiens
GGSISNSSSF

SEQ ID NO: 4025 - protein, 8 aa, Homo sapiens
GFTFTSYD

SEQ ID NO: 4026-5000 - skipped (975 entries)

SEQ ID NO: 5001 - protein, 8 aa, Homo sapiens
MHPNSGIT

SEQ ID NO: 5002 - protein, 8 aa, Homo sapiens
ISGSGGST

SEQ ID NO: 5003 - protein, 8 aa, Homo sapiens
IWFDGNTK

SEQ ID NO: 5004 - protein, 8 aa, Homo sapiens
IWFDGNTK

SEQ ID NO: 5005 - protein, 8 aa, Homo sapiens
IWFDGNNK

SEQ ID NO: 5006 - protein, 8 aa, Homo sapiens
IWFDGSNK

SEQ ID NO: 5007 - protein, 7 aa, Homo sapiens
IFYSGST

SEQ ID NO: 5008 - protein, 8 aa, Homo sapiens
ISAYNGST

SEQ ID NO: 5009 - protein, 8 aa, Homo sapiens
IWFDGNNK

SEQ ID NO: 5010 - protein, 8 aa, Homo sapiens
IWYDGINK

SEQ ID NO: 5011 - protein, 8 aa, Homo sapiens
IWSDGSNK

SEQ ID NO: 5012 - protein, 8 aa, Homo sapiens
IWYDGSNK

SEQ ID NO: 5013 - protein, 7 aa, Homo sapiens
IHYSGST

SEQ ID NO: 5014 - protein, 8 aa, Homo sapiens
IWYDGSVK

SEQ ID NO: 5015 - protein, 7 aa, Homo sapiens
IYYSGST

SEQ ID NO: 5016 - protein, 8 aa, Homo sapiens
IWYDGSNK

SEQ ID NO: 5017 - protein, 7 aa, Homo sapiens
IYYSGST

SEQ ID NO: 5018 - protein, 8 aa, Homo sapiens
LWYDGISK

SEQ ID NO: 5019 - protein, 8 aa, Homo sapiens
IWYDGSNK

SEQ ID NO: 5020 - protein, 7 aa, Homo sapiens
IYYSGST

SEQ ID NO: 5021 - protein, 8 aa, Homo sapiens
IWYDGSNK

SEQ ID NO: 5022 - protein, 8 aa, Homo sapiens
ISAYNGNT

SEQ ID NO: 5023 - protein, 8 aa, Homo sapiens
ISAYNGNT

SEQ ID NO: 5024 - protein, 7 aa, Homo sapiens
IYYSGST

SEQ ID NO: 5025 - protein, 8 aa, Homo sapiens
MHPKSGIT

SEQ ID NO: 5026-6000 - skipped (975 entries)

SEQ ID NO: 6001 - protein, 12 aa, Homo sapiens
ARYYYVSGSYDY

SEQ ID NO: 6002 - protein, 14 aa, Homo sapiens
AKAGFTMIVVAFDY

SEQ ID NO: 6003 - protein, 11 aa, Homo sapiens
ARDTTMVPMDV

SEQ ID NO: 6004 - protein, 11 aa, Homo sapiens
ARDITMVPMDV

SEQ ID NO: 6005 - protein, 11 aa, Homo sapiens
ARDTTAASFDY

SEQ ID NO: 6006 - protein, 11 aa, Homo sapiens
ARDKTVSPFDI

SEQ ID NO: 6007 - protein, 12 aa, Homo sapiens
ARDNWHDGGVDY

SEQ ID NO: 6008 - protein, 19 aa, Homo sapiens
ARDDRIAVADYYYYFGMDV

SEQ ID NO: 6009 - protein, 11 aa, Homo sapiens
ARDVTTVPFDY

SEQ ID NO: 6010 - protein, 11 aa, Homo sapiens
ARDSTASPFDY

SEQ ID NO: 6011 - protein, 10 aa, Homo sapiens
ARDIAAAIDY

SEQ ID NO: 6012 - protein, 11 aa, Homo sapiens
ARDMDYFGLDV

SEQ ID NO: 6013 - protein, 11 aa, Homo sapiens
ARDRGIGAFDI

SEQ ID NO: 6014 - protein, 11 aa, Homo sapiens
ARDRTGVPFDY

SEQ ID NO: 6015 - protein, 22 aa, Homo sapiens
AREDIVVVPAAQPPHFYFGMDV

SEQ ID NO: 6016 - protein, 11 aa, Homo sapiens
ARDFDWFGMDV

SEQ ID NO: 6017 - protein, 19 aa, Homo sapiens
ARDDGIAVAGYYFYYGLDV

SEQ ID NO: 6018 - protein, 13 aa, Homo sapiens
ARDVVGVHDAFDI

SEQ ID NO: 6019 - protein, 19 aa, Homo sapiens
ARGGAVAGTSWYYYYGMDV

SEQ ID NO: 6020 - protein, 19 aa, Homo sapiens
ARDDRIAVGPYYYYYGMDV

SEQ ID NO: 6021 - protein, 19 aa, Homo sapiens
ARGGVNWNDVGYYYYGMDV

SEQ ID NO: 6022 - protein, 13 aa, Homo sapiens
ARGFYYGSWYFDY

SEQ ID NO: 6023 - protein, 10 aa, Homo sapiens
ARSLTGLFDY

SEQ ID NO: 6024 - protein, 10 aa, Homo sapiens
ARLGFGGFDY

SEQ ID NO: 6025 - protein, 12 aa, Homo sapiens
ARYNYVSGSYDY

SEQ ID NO: 6026-7000 - skipped (975 entries)

SEQ ID NO: 7001 - protein, 290 aa, Homo sapiens
MRIFAVFIFMTYWHLLNAFTVTVPKDLYVVEYGSNMTIECKFPVEKQLDLAALIVYWEMEDKNIIQFVHGEEDLKVQHSSYRQRARLLKDQLSLGNAALQITDVKLQDAGVYRCMISYGGADYKRITVKVNAPYNKINQRILVVDPVTSEHELTCQAEGYPKAEVIWTSSDHQVLSGKTTTTNSKREEKLFNVTSTLRINTTTNEIFYCTFRRLDPEENHTAELVIPELPLAHPPNERTHLVILGAILLCLGVALTFIFRLRKGRMMDVKKCGIQDTNSKKQSDTHLEET

SEQ ID NO: 7002 - protein, 8 aa, Artificial Sequence
  Description of Artificial Sequence: Synthetic peptide
DYKDDDDK

SEQ ID NO: 7003-7999 - skipped (997 entries)

SEQ ID NO: 8000 - protein, 107 aa, Homo sapiens
  Light chain
DIQMTQSPSSLSASVGDRVTITCRASQGIRNDLGWYQQKPGKAPKRLIYAASSLQSGVPSRFSGSGSGTEFTLTISSLQPEDFATYYCQQFNNYPYTFGQGTKLEIK

SEQ ID NO: 8001 - protein, 108 aa, Homo sapiens
  Light chain
DIQMTQSPATLSLSPGERATLSCGASQSVSSSYLAWYQQKPGLAPRLLIYDASSRATGIPDRFSGSGSGTDFTLTISRLEPEDFAVYYCQQYGSSPYTFGQGTKLEIK

SEQ ID NO: 8002 - protein, 114 aa, Homo sapiens
  Light chain
DVVMTQSPLSLPVTLGQPASISCRSSQSLVYSDGNTYLNWFQQRPGQSPRRLIYKVSNRDSGVPDRFSGSGSGTDFTLKISRVEAEDVGVYYCMQGTHWPPMYTFGQGTKLEIK

SEQ ID NO: 8003 - protein, 107 aa, Homo sapiens
  Light chain
DIQMTQSPSSLSASVGDRVTITCRASQGIRNDLGWYRQKPGKAPKRLIYAASSLQSGVPSRFSGSGSGTVFTLTISSLQPEDFATYYCLQYNSYPWTFGQGPKVEIK

SEQ ID NO: 8004 - protein, 112 aa, Homo sapiens
  Light chain
DVVMTQSPLSLPVTLGQPASISCRSSQSLVYSDGNTYLNWFQQRPGQSPRRLIYKVSNRDSGVPDRFSGSGSGTDFTLKISRVEAEDVGVYYCMQGTHWPLTVGGGTKVEIK

SEQ ID NO: 8005 - protein, 107 aa, Homo sapiens; identical to SEQ ID NO: 2
  Light chain

SEQ ID NO: 8006 - protein, 107 aa, Homo sapiens
  Light chain
EIVLTQSPDFQSVTPKEKVTITCRASQSIGSSLHWYQQKPDQSPKLLIKYASQSISGVPSRFSGSGSGTDFTLTINSLEAEDAAAYYCHQSSSLPFTFGPGTKVDIK

SEQ ID NO: 8007 - protein, 107 aa, Homo sapiens; identical to SEQ ID NO: 11
  Light chain

SEQ ID NO: 8008 - protein, 108 aa, Homo sapiens; identical to SEQ ID NO: 8001
  Light chain

SEQ ID NO: 8009 - protein, 107 aa, Homo sapiens
  Light chain
EIVLTQSPDFQSVTPKEKVTITCRASQSIGSSLHWYQQKPNQSPKLLIKYTSQSISGVPSRFSGSGSGTDFTLTINSLEAEDAAAYYCHQSSSLPYTFGQGTKLEIK

SEQ ID NO: 8010 - protein, 108 aa, Homo sapiens; identical to SEQ ID NO: 5
  Light chain

SEQ ID NO: 8011 - protein, 107 aa, Homo sapiens
  Light chain
DIQMTQSPSSLSASVGDRVTITCRASQGIRNDLGWYQQKPGKAPKRLIYAASTLQSGVPSRFSGSGSGTEFTLTISSLQPEDFATYYCQQLNSYPYTFGQGTKLEIK

SEQ ID NO: 8012 - protein, 107 aa, Homo sapiens
  Light chain
EIVLTQSPDFQSVTPKEKVTITCRASQSIGSSLHWYQQKPDQSPKLLIKYASQSISGVPSRFSGSGSGTDFTLTINSLEAEDAAAYYCHQSSSLPHTFGQGTKLEIK

SEQ ID NO: 8013 - protein, 107 aa, Homo sapiens; identical to SEQ ID NO: 8012
  Light chain

SEQ ID NO: 8014 - protein, 107 aa, Homo sapiens
  Light chain
EIVLTQSPDFQSVTPKEKVTITCRASQSIGSSLHWYQQKPDQSPKLLIKYASQSISGVPSRFSGSGSGTDFTLTINSLEAEDAAAYYCHQSSSLPQTFGQGTKVEIK

SEQ ID NO: 8015 - protein, 107 aa, Homo sapiens
  Light chain
EIVLTQSPDFQSVTPKEKVTITCRASQSIGSSLHRYQQKPDQSPKLLIKYASQSFSGVPSRFSGSGSGTDFTLTINSLETEDAATYYCHQSSSLPRTFGQGTKVEIK

SEQ ID NO: 8016 - protein, 107 aa, Homo sapiens; identical to SEQ ID NO: 8015
  Light chain

SEQ ID NO: 8017 - protein, 107 aa, Homo sapiens; identical to SEQ ID NO: 8015
  Light chain

SEQ ID NO: 8018 - protein, 106 aa, Homo sapiens
  Light chain
EIVLTQSPDFQSVTPKEKVTITCRASQSIGSSLHWYQQKPDQSPKLLIKYASQSFSGVPSRFSGSGSGTDFTLTINSLEAEDAATYYCHQSSSLPTFGQGTKVEIK

SEQ ID NO: 8019 - protein, 107 aa, Homo sapiens; identical to SEQ ID NO: 8009
  Light chain

SEQ ID NO: 8020 - protein, 107 aa, Homo sapiens
  Light chain
AIQMTQSPSSLSASVGDRVTITCRASQDIRNDLGWYQQQPGKAPKLLIYAASSLQSGVPSRFSGSGSGTDFTLTISSLQPEDFATYYCLQDCNYPPTFGQGTKVEIK

SEQ ID NO: 8021 - protein, 107 aa, Homo sapiens
  Light chain
AIQMTQSPSSLSASVGDRVTITCRASQGIRNDLGWYQQKPGKAPKLLIYAALSLQSGVPSRFSGSGSGTDFTLTISSLQPEDFATYYCLQDHNYPYTFGQGTKLEIK

SEQ ID NO: 8022 - protein, 107 aa, Homo sapiens
  Light chain
AIQMTQSPSSLSASVGDRVTITCRASQGIRNDLGWYQQKPGKAPKLLIYAASSLQSGVPSRFSGSGSGTDFTLTISTLQPEDFATYYCLQDYNFPPTFGQGTKVEIK

SEQ ID NO: 8023 - protein, 107 aa, Homo sapiens; identical to SEQ ID NO: 8022
  Light chain

SEQ ID NO: 8024 - protein, 107 aa, Homo sapiens; identical to SEQ ID NO: 3
  Light chain

SEQ ID NO: 8025 - protein, 107 aa, Homo sapiens; identical to SEQ ID NO: 3
  Light chain

SEQ ID NO: 8026 - protein, 107 aa, Homo sapiens; identical to SEQ ID NO: 3
  Light chain

SEQ ID NO: 8027 - protein, 107 aa, Homo sapiens; identical to SEQ ID NO: 3
  Light chain

SEQ ID NO: 8028 - protein, 107 aa, Homo sapiens; identical to SEQ ID NO: 3
  Light chain

SEQ ID NO: 8029 - protein, 107 aa, Homo sapiens; identical to SEQ ID NO: 3
  Light chain

SEQ ID NO: 8030 - protein, 107 aa, Homo sapiens; identical to SEQ ID NO: 3
  Light chain

SEQ ID NO: 8031 - protein, 107 aa, Homo sapiens; identical to SEQ ID NO: 3
  Light chain

SEQ ID NO: 8032 - protein, 107 aa, Homo sapiens; identical to SEQ ID NO: 3
  Light chain

SEQ ID NO: 8033 - protein, 107 aa, Homo sapiens; identical to SEQ ID NO: 3
  Light chain

SEQ ID NO: 8034 - protein, 107 aa, Homo sapiens; identical to SEQ ID NO: 3
  Light chain

SEQ ID NO: 8035 - protein, 107 aa, Homo sapiens; identical to SEQ ID NO: 3
  Light chain

SEQ ID NO: 8036 - protein, 107 aa, Homo sapiens; identical to SEQ ID NO: 3
  Light chain

SEQ ID NO: 8037 - protein, 107 aa, Homo sapiens; identical to SEQ ID NO: 3
  Light chain

SEQ ID NO: 8038 - protein, 107 aa, Homo sapiens; identical to SEQ ID NO: 3
  Light chain

SEQ ID NO: 8039 - protein, 107 aa, Homo sapiens; identical to SEQ ID NO: 3
  Light chain

SEQ ID NO: 8040 - protein, 107 aa, Homo sapiens; identical to SEQ ID NO: 3
  Light chain

SEQ ID NO: 8041 - protein, 107 aa, Homo sapiens; identical to SEQ ID NO: 3
  Light chain

SEQ ID NO: 8042 - protein, 107 aa, Homo sapiens; identical to SEQ ID NO: 3
  Light chain

SEQ ID NO: 8043 - protein, 107 aa, Homo sapiens
  Light chain
AIQMTQSPSSLSASVGDRVTITCRASQGIRNDLGWYQQKPGKAPKFLIYAASSLQSGVPSRFSGSGSGTDFTLTISSLQPEDFATYYCLQDYNYPRTFGQGTKVEIK

SEQ ID NO: 8044 - protein, 107 aa, Homo sapiens; identical to SEQ ID NO: 8043
  Light chain

SEQ ID NO: 8045 - protein, 107 aa, Homo sapiens; identical to SEQ ID NO: 8043
  Light chain

SEQ ID NO: 8046 - protein, 107 aa, Homo sapiens; identical to SEQ ID NO: 11
  Light chain

SEQ ID NO: 8047 - protein, 107 aa, Homo sapiens; identical to SEQ ID NO: 11
  Light chain

SEQ ID NO: 8048 - protein, 106 aa, Homo sapiens
  Light chain
AIQMTQSPSSLSASVGDRVTITCRASQGIRNDLGWYQQKPGKAPKFLIYAASSLQSGVPSRFSGSGSGTDFTLTISSLQPEDFATYYCLQDYNYRTFGQGTKVEIK

SEQ ID NO: 8049 - protein, 106 aa, Homo sapiens; identical to SEQ ID NO: 8048
  Light chain

SEQ ID NO: 8050 - protein, 107 aa, Homo sapiens; identical to SEQ ID NO: 15
  Light chain

SEQ ID NO: 8051 - protein, 107 aa, Homo sapiens
  Light chain
DIQMTQSPSSLSASVGDRVTITCRASQGIRDDLGWYQQKPGKAPKRLIYAASSLQSGVPSRFSGSGSGTEFTLTISSLQPEDFATYYCLQHNSYPFTFGPGTKVDIK

SEQ ID NO: 8052 - protein, 107 aa, Homo sapiens; identical to SEQ ID NO: 8051
  Light chain

SEQ ID NO: 8053 - protein, 107 aa, Homo sapiens
  Light chain
DIQMTQSPSSLSASVGDRVTITCRASQGIRNDLGWYQQKPGKAPKRLIYAASSLQSGVPSRFSGSGSGTEFTLTISSLQPEDFATYYCLQHNSYPLTFGGGTKVEIK

SEQ ID NO: 8054 - protein, 107 aa, Homo sapiens; identical to SEQ ID NO: 8053
  Light chain

SEQ ID NO: 8055 - protein, 107 aa, Homo sapiens; identical to SEQ ID NO: 8053
  Light chain

SEQ ID NO: 8056 - protein, 107 aa, Homo sapiens; identical to SEQ ID NO: 8053
  Light chain

SEQ ID NO: 8057 - protein, 107 aa, Homo sapiens; identical to SEQ ID NO: 8053
  Light chain

SEQ ID NO: 8058 - protein, 108 aa, Homo sapiens; identical to SEQ ID NO: 23
  Light chain

SEQ ID NO: 8059 - protein, 107 aa, Homo sapiens; identical to SEQ ID NO: 12
  Light chain

SEQ ID NO: 8060 - protein, 107 aa, Homo sapiens; identical to SEQ ID NO: 12
  Light chain

SEQ ID NO: 8061 - protein, 107 aa, Homo sapiens; identical to SEQ ID NO: 12
  Light chain

SEQ ID NO: 8062 - protein, 107 aa, Homo sapiens; identical to SEQ ID NO: 12
  Light chain

SEQ ID NO: 8063 - protein, 107 aa, Homo sapiens; identical to SEQ ID NO: 12
  Light chain

SEQ ID NO: 8064 - protein, 107 aa, Homo sapiens; identical to SEQ ID NO: 12
  Light chain

SEQ ID NO: 8065 - protein, 107 aa, Homo sapiens; identical to SEQ ID NO: 12
  Light chain

SEQ ID NO: 8066 - protein, 107 aa, Homo sapiens; identical to SEQ ID NO: 12
  Light chain

SEQ ID NO: 8067 - protein, 107 aa, Homo sapiens; identical to SEQ ID NO: 12
  Light chain

SEQ ID NO: 8068 - protein, 107 aa, Homo sapiens; identical to SEQ ID NO: 8
  Light chain

SEQ ID NO: 8069 - protein, 107 aa, Homo sapiens; identical to SEQ ID NO: 8
  Light chain

SEQ ID NO: 8070 - protein, 107 aa, Homo sapiens; identical to SEQ ID NO: 8
  Light chain

SEQ ID NO: 8071 - protein, 107 aa, Homo sapiens; identical to SEQ ID NO: 8
  Light chain

SEQ ID NO: 8072 - protein, 107 aa, Homo sapiens; identical to SEQ ID NO: 8
  Light chain

SEQ ID NO: 8073 - protein, 107 aa, Homo sapiens; identical to SEQ ID NO: 8
  Light chain

SEQ ID NO: 8074 - protein, 107 aa, Homo sapiens
  Light chain
DIQMTQSPSSLSASVGDRVTITCRASQGIGSDLGWYQQKPGKAPKRLIYAASSLQSGVPSRFSGSGSGTEFTLTISSLQPEDFATYYCLQHNSYPYTFGQGTKLEIK

SEQ ID NO: 8075 - protein, 107 aa, Homo sapiens; identical to SEQ ID NO: 17
  Light chain

SEQ ID NO: 8076 - protein, 114 aa, Homo sapiens; identical to SEQ ID NO: 8002
  Light chain

SEQ ID NO: 8077 - protein, 114 aa, Homo sapiens; identical to SEQ ID NO: 8002
  Light chain

SEQ ID NO: 8078 - protein, 114 aa, Homo sapiens; identical to SEQ ID NO: 8002
  Light chain

SEQ ID NO: 8079 - protein, 113 aa, Homo sapiens
  Light chain
DVVMTQSPLSLPVTLGQPASISCRSSQSLVYSDGNTYLNWFQQRPGQSPRRLIYKVSNRDSGVPDRFSGSGSGTDFTLKISRVEAEDVGVYYCMQGTHWPPYTFGQGTKLEIK

SEQ ID NO: 8080 - protein, 107 aa, Homo sapiens
  Light chain
DIQMTQSPSSLSASVGDRVTITCRASQGISNYLAWYQQKPGKVPKLLIHAASTLQSGVPSRFSGSGSGTDFTLTISSLQPEDVATYYCQKYNSAPSNFGQGTKLEIK

SEQ ID NO: 8081 - protein, 107 aa, Homo sapiens
  Light chain
DIQMTQSPSSLSASVGDRVTITCRASQGIGNYLAWYQQKPGKVPKLLIHAASTLQSGVPSRFSGSGSGTDFTLTISSLQPEDVATYYCQKYNSAPSTFGQGTKLEIK

SEQ ID NO: 8082 - protein, 107 aa, Homo sapiens; identical to SEQ ID NO: 8081
  Light chain

SEQ ID NO: 8083 - protein, 107 aa, Homo sapiens; identical to SEQ ID NO: 8081
  Light chain

SEQ ID NO: 8084 - protein, 107 aa, Homo sapiens; identical to SEQ ID NO: 8081
  Light chain

SEQ ID NO: 8085 - protein, 107 aa, Homo sapiens; identical to SEQ ID NO: 8081
  Light chain

SEQ ID NO: 8086 - protein, 107 aa, Homo sapiens; identical to SEQ ID NO: 8081
  Light chain

SEQ ID NO: 8087 - protein, 107 aa, Homo sapiens; identical to SEQ ID NO: 8081
  Light chain

SEQ ID NO: 8088 - protein, 107 aa, Homo sapiens; identical to SEQ ID NO: 8081
  Light chain

SEQ ID NO: 8089 - protein, 107 aa, Homo sapiens
  Light chain
EIVMTQSPTTLSLSPGERATLSCRASQSVSSSYLSWYQQKPGQAPRLLIYGASTRATGIPARFSGSGSGTDFTLTISSLQPEDFAVYYCQQDCNLRTSGQVTKVEIK

SEQ ID NO: 8090 - protein, 107 aa, Homo sapiens
  Light chain
EIVMTQSPTTLSLSPGERATLSCRASQSVSSSYLSWYQQKPGQAPRLLIYGASTRATGIPARFSGSGSGTDFTLTISSLQQEELAVYYCQQDYDLRTHGQATKVEKK

SEQ ID NO: 8091 - protein, 107 aa, Homo sapiens
  Light chain
EIVMTQSPTTLSLSPGERATLSCRASQSVSSSYLSWYQQKPGQAPRLLIYGASTRATGIPARFSGSGSGTDFTLTISSLQPEDFAVYYCQQDYNFRTSGQGTKVEIK

SEQ ID NO: 8092 - protein, 107 aa, Homo sapiens; identical to SEQ ID NO: 6
  Light chain

SEQ ID NO: 8093 - protein, 107 aa, Homo sapiens; identical to SEQ ID NO: 13
  Light chain

SEQ ID NO: 8094 - protein, 107 aa, Homo sapiens; identical to SEQ ID NO: 24
  Light chain

SEQ ID NO: 8095 - protein, 108 aa, Homo sapiens
  Light chain
EIVMTQSPATLSLSPGERATLSCRASQSVSSNYLSWFQQKPGQAPRLLIYGASTRATGIPARFSGSGSGTDFTLTISSLQPEDFAVYYCQQDYNLPFTFGPGTKVDIK

SEQ ID NO: 8096 - protein, 108 aa, Homo sapiens; identical to SEQ ID NO: 10
  Light chain

SEQ ID NO: 8097 - protein, 108 aa, Homo sapiens; identical to SEQ ID NO: 10
  Light chain

SEQ ID NO: 8098 - protein, 108 aa, Homo sapiens
  Light chain
EIVMTQSPGTLSLSPGERATLSCRASQSVSSSYLAWYQQKPGQAPRLLIYGASTRATGIPDRFSGSGSGTDFTLTISSLQPEDFAVYYCQQDYNLPLTFGGGTKVEIK

SEQ ID NO: 8099 - protein, 109 aa, Homo sapiens
  Light chain
EIVMTQSPATLSLSPGERATLSCRASQSVSSSYLSWYQQKPGQAPRLLIYGASTRATGIPARFSGSGSGTDFTLTISSLQPEDFAVYYCQQDYNLPPYTFGQGTKLEIK

SEQ ID NO: 8100 - protein, 109 aa, Homo sapiens; identical to SEQ ID NO: 8099
  Light chain

SEQ ID NO: 8101 - protein, 109 aa, Homo sapiens; identical to SEQ ID NO: 8099
  Light chain

SEQ ID NO: 8102 - protein, 108 aa, Homo sapiens
  Light chain
EIVMTQSPATLSLSPGERATLSCWASQSVSSSYLSWYQQKPGQAPRLLIYGASTRATGIPARFSGSGSGTDFTLTISSLQPEDFAVYYCQQDYNLPYPLGQWTKLEIK

SEQ ID NO: 8103 - protein, 108 aa, Homo sapiens; identical to SEQ ID NO: 9
  Light chain

SEQ ID NO: 8104 - protein, 108 aa, Homo sapiens; identical to SEQ ID NO: 1
  Light chain

SEQ ID NO: 8105 - protein, 108 aa, Homo sapiens; identical to SEQ ID NO: 1
  Light chain

SEQ ID NO: 8106 - protein, 107 aa, Homo sapiens
  Light chain
EIVMTQSPTTLSLSPGERATLSCRASQSVSSSYLSWYQQKPGQAPRLLIYGASTRATGIPARFSGSGSGTDFTLTISSLQPEDFAVYYCQQDYNLRAFGQGTKVEIK

SEQ ID NO: 8107 - protein, 107 aa, Homo sapiens
  Light chain
EIVMTQSPTTLSLSPGERATLSCRASQSVSSSYLSWYQQKPGQAPRLLIYGASTRATGIPARFSGSGSGTDFTLTISSLQPEDFAVYYCQQDYNLRPFGQGTKVEIN

SEQ ID NO: 8108 - protein, 107 aa, Homo sapiens; identical to SEQ ID NO: 7
  Light chain

SEQ ID NO: 8109 - protein, 107 aa, Homo sapiens; identical to SEQ ID NO: 7
  Light chain

SEQ ID NO: 8110 - protein, 107 aa, Homo sapiens; identical to SEQ ID NO: 7
  Light chain

SEQ ID NO: 8111 - protein, 107 aa, Homo sapiens; identical to SEQ ID NO: 7
  Light chain

SEQ ID NO: 8112 - protein, 107 aa, Homo sapiens; identical to SEQ ID NO: 7
  Light chain

SEQ ID NO: 8113 - protein, 107 aa, Homo sapiens; identical to SEQ ID NO: 7
  Light chain

SEQ ID NO: 8114 - protein, 107 aa, Homo sapiens; identical to SEQ ID NO: 7
  Light chain

SEQ ID NO: 8115 - protein, 107 aa, Homo sapiens; identical to SEQ ID NO: 7
  Light chain

SEQ ID NO: 8116 - protein, 107 aa, Homo sapiens; identical to SEQ ID NO: 7
  Light chain

SEQ ID NO: 8117 - protein, 107 aa, Homo sapiens; identical to SEQ ID NO: 7
  Light chain

SEQ ID NO: 8118 - protein, 107 aa, Homo sapiens; identical to SEQ ID NO: 7
  Light chain

SEQ ID NO: 8119 - protein, 107 aa, Homo sapiens; identical to SEQ ID NO: 7
  Light chain

SEQ ID NO: 8120 - protein, 107 aa, Homo sapiens
  Light chain
EIVMTQSPATLSLSPGERATLSCRASQSVSSSYLSWYQQKPGQAPRLLIYGASTRATGIPARFSGSGSGTDFTLTISSLQPEDFAVYYCQQDYNLYTFGQGTKLEIK

SEQ ID NO: 8121 - protein, 107 aa, Homo sapiens; identical to SEQ ID NO: 8120
  Light chain

SEQ ID NO: 8122 - protein, 107 aa, Homo sapiens; identical to SEQ ID NO: 8000
  Light chain

SEQ ID NO: 8123 - protein, 107 aa, Homo sapiens; identical to SEQ ID NO: 8000
  Light chain

SEQ ID NO: 8124 - protein, 106 aa, Homo sapiens
  Light chain
AIQLTQSPSSLSASIGDRVTITCRASQGIRNDLGWYQQKPGKAPKLLIYDASSLESGVPSRFSGSGSGTDFTLTISSLQPEDFATYYCQQFNNYYTFGQGTKLEIK

SEQ ID NO: 8125 - protein, 106 aa, Homo sapiens; identical to SEQ ID NO: 8124
  Light chain

SEQ ID NO: 8126 - protein, 106 aa, Homo sapiens; identical to SEQ ID NO: 8124
  Light chain

SEQ ID NO: 8127 - protein, 107 aa, Homo sapiens
  Light chain
EIVMTQSPTTLSLSPGERATLSCRASQSVSSSYLSWYQQKPGQAPRLLIYGASTRATGIPARFSGSGSGTDFTLTISSLQPEDFAVYYCQQGYNLRTFGQVTKVEIK

SEQ ID NO: 8128 - protein, 107 aa, Homo sapiens; identical to SEQ ID NO: 8127
  Light chain

SEQ ID NO: 8129 - protein, 107 aa, Homo sapiens; identical to SEQ ID NO: 21
  Light chain

SEQ ID NO: 8130 - protein, 107 aa, Homo sapiens
  Light chain
DIQLTQSPSFLSASVGDRVTITCRASQGISSYLAWYQQKPGKAPKLLIYAASTLQSGVPSRFSGSGSGTEFTLTISSLQPEDFATYYCQQLNSYPHTFGQGNKLEIK

SEQ ID NO: 8131 - protein, 107 aa, Homo sapiens; identical to SEQ ID NO: 8130
  Light chain

SEQ ID NO: 8132 - protein, 107 aa, Homo sapiens; identical to SEQ ID NO: 19
  Light chain

SEQ ID NO: 8133 - protein, 107 aa, Homo sapiens
  Light chain
DIQMTQSPSSLSASVGDRVTITCRASQSISSYLNWYQQKPGKAPKLLIFAASSLQSGVPSRFSGSGSGTDFTLTISSLQPEDFATYYCQQSYSTPITFGQGTRLEIK

SEQ ID NO: 8134 - protein, 107 aa, Homo sapiens
  Light chain
DIQMTQSPSSLSASVGDRATITCRASQSISRYLNWYQQKPGRAPKLLIQAASSLQSGVPSRFSGSGSGTDFTLTISSLQPEDFGTYYCQQSYSTPRTFGQGTKVEIK

SEQ ID NO: 8135 - protein, 108 aa, Homo sapiens; identical to SEQ ID NO: 8001
  Light chain

SEQ ID NO: 8136 - protein, 107 aa, Homo sapiens; identical to SEQ ID NO: 18
  Light chain

SEQ ID NO: 8137 - protein, 107 aa, Homo sapiens
  Light chain
DIQMTQSPSSLSASVGDRVTITCRASQDISSWLAWYQQKPEKAPKSLIYAASSLQSGVPSRFSGWGSGTDFTLTISSLQPEDFATYYCQQYNSCPPTFGQGTKLEIK

SEQ ID NO: 8138 - protein, 107 aa, Homo sapiens
  Light chain
DIQMTQSPSSLSASVGDRVTITCRASQGISSWLAWYQQKPEKAPKSLIYAASSLQSGVPSRFSGSGSGTDFTLTISSLQPEDFATYYCQQYNSYPPTFGQGTKLEIK

SEQ ID NO: 8139 - protein, 107 aa, Homo sapiens; identical to SEQ ID NO: 8138
  Light chain

SEQ ID NO: 8140 - protein, 107 aa, Homo sapiens; identical to SEQ ID NO: 8138
  Light chain

SEQ ID NO: 8141 - protein, 107 aa, Homo sapiens; identical to SEQ ID NO: 22
  Light chain

SEQ ID NO: 8142 - protein, 107 aa, Homo sapiens; identical to SEQ ID NO: 22
  Light chain

SEQ ID NO: 8143 - protein, 107 aa, Homo sapiens; identical to SEQ ID NO: 22
  Light chain

SEQ ID NO: 8144 - protein, 107 aa, Homo sapiens; identical to SEQ ID NO: 2
  Light chain

SEQ ID NO: 8145 - protein, 107 aa, Homo sapiens; identical to SEQ ID NO: 2
  Light chain

SEQ ID NO: 8146 - protein, 107 aa, Homo sapiens; identical to SEQ ID NO: 2
  Light chain

SEQ ID NO: 8147 - protein, 107 aa, Homo sapiens; identical to SEQ ID NO: 2
  Light chain

SEQ ID NO: 8148 - protein, 107 aa, Homo sapiens; identical to SEQ ID NO: 2
  Light chain

SEQ ID NO: 8149 - protein, 107 aa, Homo sapiens; identical to SEQ ID NO: 2
  Light chain

SEQ ID NO: 8150 - protein, 107 aa, Homo sapiens
  Light chain
EIVMTQSPTTLSLSPGERATLSCRASQSVSSSYLSWYQQKPGQAPRLLIYGASTRATGIPARFSGSGSGTDFTLTISSLQPEDFAVYYCQRDYNLRTCGQGTKVEIK

SEQ ID NO: 8151 - protein, 107 aa, Homo sapiens
  Light chain
EIVMTQSPTTLSLSPGERATLSCRASQSVSSSYLSWYQQKPGQAPRLLIYGASTRATGIPARFSGSGSGTDFTLTISSLQPEDFAVYYCRQDYNLRTFGQGTKVEIK

SEQ ID NO: 8152 - protein, 108 aa, Homo sapiens; identical to SEQ ID NO: 25
  Light chain

SEQ ID NO: 8153 - protein, 123 aa, Homo sapiens
  Heavy chain
EVQLVESGGGLVKPGGSLRLSCAASGFTFSDYYMSWIRQAPGKGLEWVSAISGSGGSTYYADSVKGRFTISRDNSKNTLYLQMNSLRAEDTAVYYCAKVRWMVRGVGYFDLWGRGTLVTVSSA

SEQ ID NO: 8154 - protein, 123 aa, Homo sapiens; identical to SEQ ID NO: 8153
  Heavy chain

SEQ ID NO: 8155 - protein, 121 aa, Homo sapiens
  Heavy chain
QVQLVQSGAEVKKPGASVKVSCKVSVYTLTELSMHWVRQAPGKGLEWMGGFDPEDGETIYAQKFQGRVTMTEDTSTDTAYMELSSLRSEDTAVYYCATGWGSYYNWFDPWGQGTLVTVSSA

SEQ ID NO: 8156 - protein, 123 aa, Homo sapiens
  Heavy chain
QVQLVESGGGVVQPGRSLRLSCGASGFTFSSYGMHWVRQAPGKGLEWVAVIWYDGSNKYYADSVKGRFTISRDNSKNMLYLQMNSLRAEDTAVYYCARIAAAGYYYYGMDVWGQGTTVTVSSA

SEQ ID NO: 8157 - protein, 120 aa, Homo sapiens
  Heavy chain
QVQLVQSGAEVKKPGASVKVSCKVSGYTLTELSMHWVRQAPGKGLEWMGGFDPEDGETIYAQKFQGRVTMTEDTSTDTAYMELSSLRSEDTAVYYCATLTGDRDYFDYWGQGTLVTVSSA

SEQ ID NO: 8158 - protein, 122 aa, Homo sapiens; identical to SEQ ID NO: 102
  Heavy chain

SEQ ID NO: 8159 - protein, 122 aa, Homo sapiens
  Heavy chain
QVQLVESGGGVVQPGRSLRLSCAASGFTFSSSGMHWVRQAPGKGLEWVAVIWYDGSDKYYADSVKGRFTISRDNSKNTLYLQMNSLRAEDTAVYYCARDRLYSGDDFFDYWGQGTLVTVSSA

SEQ ID NO: 8160 - protein, 120 aa, Homo sapiens
  Heavy chain
QVQLVESGGGVVQPGRSLRLSCAASGFTFSSYDMHWVRQAPGKGLEWVAVMWYDGSNKYYADSVKGRFTISRDSSKNTLYLQMNSLRAEDTAMYYCARDQWGSGAFDIWGQGTMVTVSSA

SEQ ID NO: 8161 - protein, 123 aa, Homo sapiens
  Heavy chain
EVQLVESGGGLVQPGGSLRLSCAASGFTFSSYAMSWVRQAPGKGLEWVSAISGSGGSTYYADSVKGRFTISRDNSKNTLYLQMNSLRAEDTAVYYCAKGRWMVRGVGYFDLWGRGTLVTVSSA

SEQ ID NO: 8162 - protein, 123 aa, Homo sapiens; identical to SEQ ID NO: 8153
  Heavy chain

SEQ ID NO: 8163 - protein, 119 aa, Homo sapiens; identical to SEQ ID NO: 105
  Heavy chain

SEQ ID NO: 8164 - protein, 123 aa, Homo sapiens; identical to SEQ ID NO: 8153
  Heavy chain

SEQ ID NO: 8165 - protein, 123 aa, Homo sapiens; identical to SEQ ID NO: 8153
  Heavy chain

SEQ ID NO: 8166 - protein, 123 aa, Homo sapiens
  Heavy chain
EVQLVESGGGLVKPGGSLRLSCAASGFTFSNAWMSWVRQAPGKGLEWVGRIKSKTDGGTIDYAAPVKGRFTISRDDSKNTLYLQMNSLKTEDTAVYYCTTKRYSGFDFLDYWGQGTLVTVSSD

SEQ ID NO: 8167 - protein, 123 aa, Homo sapiens; identical to SEQ ID NO: 8153
  Heavy chain

SEQ ID NO: 8168 - protein, 123 aa, Homo sapiens; identical to SEQ ID NO: 8161
  Heavy chain

SEQ ID NO: 8169 - protein, 123 aa, Homo sapiens
  Heavy chain
EVQLVESGGGLVKPGGSLRLSCAASGFTFSDYYMSWIRQAPGKGLEWVSAISGSGGSTYYADSVKGRFTISRDNSKNTLYLQMNSLRAEDTAVYYCAKVRWMVRGAGYFDLWGRGTLVTVSSA

SEQ ID NO: 8170 - protein, 123 aa, Homo sapiens; identical to SEQ ID NO: 8153
  Heavy chain

SEQ ID NO: 8171 - protein, 123 aa, Homo sapiens; identical to SEQ ID NO: 8153
  Heavy chain

SEQ ID NO: 8172 - protein, 123 aa, Homo sapiens; identical to SEQ ID NO: 8169
  Heavy chain

SEQ ID NO: 8173 - protein, 119 aa, Homo sapiens; identical to SEQ ID NO: 104
  Heavy chain

SEQ ID NO: 8174 - protein, 120 aa, Homo sapiens; identical to SEQ ID NO: 8160
  Heavy chain

SEQ ID NO: 8175 - protein, 119 aa, Homo sapiens
  Heavy chain
QVQLVESGGGVVQPGRSLRLSCAASGFTFSSYGMHWVRQAPGKGLEWVSVIWFDGSNKFYADSVKGRFTISRDNSKNTLYLQMNSLRAEDTAMYFCARDITLVPMDVWGQGTTVTVSSA

SEQ ID NO: 8176 - protein, 119 aa, Homo sapiens
  Heavy chain
QVQLVESGGGVVQPGRSLRLSCAASGFTFSSYGMHWVRQAPGKGLEWVSVIWFDGSNKFYADSVKGRFTISRDNSKNTLYLQMNSLRAEDTAMYFCARDTTLVPMDVWGQGTTVTVSSA

SEQ ID NO: 8177 - protein, 118 aa, Homo sapiens; identical to SEQ ID NO: 111
  Heavy chain

SEQ ID NO: 8178 - protein, 119 aa, Homo sapiens
  Heavy chain
QVQLVESGGGVVQPGRSLRLSCAASGFTFSSYGMHWVRQAPGKGLEWVAVIWHDGSSKSYADSVKGRFTISRDNSKNTLYLQMNSLRAEDTAVYYCARDITAVPMDVWRQGTAVTVSSA

SEQ ID NO: 8179 - protein, 119 aa, Homo sapiens
  Heavy chain
QVQLVESGGGVVQPGRSLRISCAASGFTFSNYGMHWVRQAPGKGLEWVAVIWFDGNTKYYTDSVKGRFTISRDNSKNTLYLQMNSLRAEDTAVYYCARDITIVPMDVWGQGTTVTVSSA

SEQ ID NO: 8180 - protein, 119 aa, Homo sapiens
  Heavy chain
QVQLVESGGGAVQPGRSLRLSCAASGFTFSNYGMHWVRQAPGKGLEWVAVIWFDGNTKYYTDSVKGRFTISRDNSKNTLYLQMNSLRAEDTAVYYCARDITMAPMDVWGQGTTVTVSSA

SEQ ID NO: 8181 - protein, 119 aa, Homo sapiens
  Heavy chain
QVQLVESGGGVVQPGGSLSLSCAASGFTFSNYCLHWVRQAPGKGLEWVAVIWFDGNTKYYTDSVKGRFTTSRDNSKNTLYLQMNRLRAEETAVYYCARDITMGPMDVWGQGTTVTVSSA

SEQ ID NO: 8182 - protein, 119 aa, Homo sapiens; identical to SEQ ID NO: 104
  Heavy chain

SEQ ID NO: 8183 - protein, 119 aa, Homo sapiens
  Heavy chain
QVQLVESGGGVVQPGRSLRLSCAASGFTFSNYGMHWVRQAPGKGLEWVAVIWFDGNTKYYTDSVKGRFTISRDNSKNTLYLQMNSLRAEDTAVYYCARDITTVPMDVWGQGTTVTVSSA

SEQ ID NO: 8184 - protein, 119 aa, Homo sapiens
  Heavy chain
QVQLVESGGGVVQPGRSLRLSCAASGFTFSSYGMHWVRQAPGKGLEWVAVIWHDGSSKSYADSVKGRFTISRDNSKNTLYLQMNSLRAEDTAGYYCARDITVAPMDVRRQGTAVTGSSA

SEQ ID NO: 8185 - protein, 119 aa, Homo sapiens
  Heavy chain
QVQLVESGGGVVQPGRSLRLSCAASGFTFSSYGMHWVRQAPGKGLEWVAVIWHDGSSKSYADSVKGRFTISRDNSKNTLYLQMNSLRAEDTAVYYCARDITVVPMDVWGQGTAVTVSSA

SEQ ID NO: 8186 - protein, 119 aa, Homo sapiens; identical to SEQ ID NO: 112
  Heavy chain

SEQ ID NO: 8187 - protein, 119 aa, Homo sapiens
  Heavy chain
QVQLVESGGGVVQPGRSLRLSCAASGFTFSNYGMHWVRQAPGKGLEWVAVIWFDGNTKYYTDSVKGRFTISRDNSKNTLYLQMNSLRAEDTAMYYCARDNTMVPMDVWGQGTTVTVSSA

SEQ ID NO: 8188 - protein, 119 aa, Homo sapiens
  Heavy chain
QVQLVESGGGVVQPGRSLRLSCAASGFTFSNYGMHWVRQAPGKGLEWVAVIWFDGNTKYYTDSVKGRFTISRDNSKNTLYLQMNSLRAEDTAVYYCARDSTMVPMDVWGQGTTVTVSSA

SEQ ID NO: 8189 - protein, 119 aa, Homo sapiens
  Heavy chain
QVQLVESGGGVVQPGRSLRLSCAASGFTFSSYGMHWVRQAPGKGLEWVAVIWHDGSSKSYADSVKGRFTISRDKSKNTLYLQMNSLRAEDTAVYYCARDTTAVPMDVWGQGTAVTVSSA

SEQ ID NO: 8190 - protein, 119 aa, Homo sapiens
  Heavy chain
QVQLVESGGGVVQPGRSLRLSCAASGFTFSNYGMHWVRQAPGKGLEWVAVIWFDGNTKYYTDSVKGRFTISRDNSKNTLYLQMNSLRAEDTAVYYCARDTTMGPMDVWGQGTTVTVSSA

SEQ ID NO: 8191 - protein, 119 aa, Homo sapiens; identical to SEQ ID NO: 103
  Heavy chain

SEQ ID NO: 8192 - protein, 119 aa, Homo sapiens
  Heavy chain
QVQLVESGGGVVQPGRSLRLSCAASGFTFSSYGMHWVRQAPGKGLEWVAVIWHDGSSKSYADSVKGRFTISRDNSKNTLYLQMNSLRAEDTAVYYCARDTTVAPMDVWGQGTAVTVSSA

SEQ ID NO: 8193 - protein, 119 aa, Homo sapiens
  Heavy chain
QVQLVESGGGVVQPGRSLRLSCAASGFTFSGYGMHWVRQAPGKGLEWVAIIWFDGITKYYADSVKGRFTISRDNSRNTLYLQMNSLRAEDTAVYYCARDTTVTPFDYWGQGTLVTVSSA

SEQ ID NO: 8194 - protein, 119 aa, Homo sapiens
  Heavy chain
QVQLVESGGGVVQPGRSLRLSCAASGFTFSSYGMHWVRQAPGKGLEWVAVIWHDGSSKSYADSVKGRFTISRDKSKNTLYLQMNSLRAEDTAVYYCARDTTVVPMDAWGQGTAVTVASA

SEQ ID NO: 8195 - protein, 119 aa, Homo sapiens
  Heavy chain
QVQLVESGGGVVQPGRSLRLSCAASGFTFSSYGMHWVRQAPGKGLEWVAVIWHDGSSKSYADSVKGRFTISRDNSKNTLCLQMNSLRAEDTAVYYCARDTTVVPMDVWGQGTAVTVSSA

SEQ ID NO: 8196 - protein, 123 aa, Homo sapiens; identical to SEQ ID NO: 8161
  Heavy chain

SEQ ID NO: 8197 - protein, 123 aa, Homo sapiens; identical to SEQ ID NO: 8169
  Heavy chain

SEQ ID NO: 8198 - protein, 123 aa, Homo sapiens; identical to SEQ ID NO: 8153
  Heavy chain

SEQ ID NO: 8199 - protein, 118 aa, Homo sapiens; identical to SEQ ID NO: 111
  Heavy chain

SEQ ID NO: 8200 - protein, 120 aa, Homo sapiens
  Heavy chain
QVQLVESGGGVVQPGRSLRLSCAASGFTFSSYDMHWVRQAPGKGLEWVAVMWYDGSNKYYADSVKGRFTISRDSSKNTLYLQMNSLRAEDTAMYYCARDQWGSGAIDIWGQGTMVTVSSA

SEQ ID NO: 8201 - protein, 123 aa, Homo sapiens; identical to SEQ ID NO: 8169
  Heavy chain

SEQ ID NO: 8202 - protein, 123 aa, Homo sapiens; identical to SEQ ID NO: 8153
  Heavy chain

SEQ ID NO: 8203 - protein, 131 aa, Homo sapiens; identical to SEQ ID NO: 115
  Heavy chain

SEQ ID NO: 8204 - protein, 123 aa, Homo sapiens; identical to SEQ ID NO: 8169
  Heavy chain

SEQ ID NO: 8205 - protein, 123 aa, Homo sapiens; identical to SEQ ID NO: 8153
  Heavy chain

SEQ ID NO: 8206 - protein, 123 aa, Homo sapiens; identical to SEQ ID NO: 8161
  Heavy chain

SEQ ID NO: 8207 - protein, 123 aa, Homo sapiens; identical to SEQ ID NO: 8169
  Heavy chain

SEQ ID NO: 8208 - protein, 123 aa, Homo sapiens; identical to SEQ ID NO: 8153
  Heavy chain

SEQ ID NO: 8209 - protein, 131 aa, Homo sapiens
  Heavy chain
QLQLQESGPGLVKPSETLSLTCTVSGGSISSSNYHWGWIRQPPGKGLEWIGSIYYSGSTYYNPSLKSRVPISVDTSKKQFPLKLPSVTAADTAVYYCAREDIVVVPAAQPPHFHFGMDVWGQGTTVTVSSA

SEQ ID NO: 8210 - protein, 125 aa, Homo sapiens
  Heavy chain
QVQLVESGGGVVQPGRSLRLSCAASGFTFSDYNMHWVRQAPGKGLEWVASIWYDGNNKFYATSVKGRFTVSRDNSKNTLSLQMNSLRAEDTTVYYCARGRAPYYDILTGFFDYWGQGTQVTVSSA

SEQ ID NO: 8211 - protein, 118 aa, Homo sapiens; identical to SEQ ID NO: 123
  Heavy chain

SEQ ID NO: 8212 - protein, 123 aa, Homo sapiens; identical to SEQ ID NO: 8153
  Heavy chain

SEQ ID NO: 8213 - protein, 119 aa, Homo sapiens; identical to SEQ ID NO: 116
  Heavy chain

SEQ ID NO: 8214 - protein, 119 aa, Homo sapiens; identical to SEQ ID NO: 104
  Heavy chain

SEQ ID NO: 8215 - protein, 119 aa, Homo sapiens
  Heavy chain
QVQLVESGGGVVQPGRSLRLSCAASGFTFSSYGMHWVRQAPGKGLEWVAVIWYDGSNKSYADSVKGRFTFSRDNSKNTLYLQMNSLRAEDTAVYYCARDMDYFGLDAWGQGTTVTVSSA

SEQ ID NO: 8216 - protein, 119 aa, Homo sapiens; identical to SEQ ID NO: 112
  Heavy chain

SEQ ID NO: 8217 - protein, 119 aa, Homo sapiens
  Heavy chain
QVQLVESGGGVVQPGRSLRLSCAASGFTFSSYGMHWVRQAPGKGLEWVAVIWYDGSNKSYADSVKGRFTFSRDNSKNTLYLQMNSLRAEDTAVYYCARDMDYFGMDVWGQGTTVTVSSA

SEQ ID NO: 8218 - protein, 119 aa, Homo sapiens
  Heavy chain
QVQLVESGGGVVQPGRSLRLSCAASGFTFSSYGMHWVRQAPGKGLEWVAVIWYDGSNKSYADSVKGRFTFSRDNSKNTLYLQMNSLRAEDTAVYYCARDMDYYGLDVWGQGTTVTVSSA

SEQ ID NO: 8219 - protein, 119 aa, Homo sapiens
  Heavy chain
QVQLVESGGGVVQPGRSLRLSCAASGFTFSSYGMHWVRQAPGKGLEWVAVIWYDGSNKYYADSVKGRFTISRDNSNDTLFLQMNSRRAEDTAVDYCARDSDWFGMDVWGQGTTLTVSSA

SEQ ID NO: 8220 - protein, 119 aa, Homo sapiens
  Heavy chain
QVQLVESGGGVVQPGRSLRLSCAASGFTFSSYGMHWVRQAPGKGLEWVAVIWYDGSNKSYADSVKGRFTFSRDNSKTTLYLQMNSLRAEDTAVYYCARDTDYFGLDVWGQGTTVTVSSA

SEQ ID NO: 8221 - protein, 123 aa, Homo sapiens; identical to SEQ ID NO: 8161
  Heavy chain

SEQ ID NO: 8222 - protein, 123 aa, Homo sapiens; identical to SEQ ID NO: 8169
  Heavy chain

SEQ ID NO: 8223 - protein, 123 aa, Homo sapiens; identical to SEQ ID NO: 8153
  Heavy chain

SEQ ID NO: 8224 - protein, 127 aa, Homo sapiens; identical to SEQ ID NO: 108
  Heavy chain

SEQ ID NO: 8225 - protein, 126 aa, Homo sapiens
  Heavy chain
QVQLQESGPGLAKPSATLSLTCTVSGGSISSYYWRWVRQPPGKGLEWVGYIYYSGSTNYNPSLKSRATISVGTSKNQFSLKLSSVTAAGTAVYYCARDDRIAVGPDYYYYGMDVWGQGTTVTVSSA

SEQ ID NO: 8226 - protein, 126 aa, Homo sapiens; identical to SEQ ID NO: 120
  Heavy chain

SEQ ID NO: 8227 - protein, 123 aa, Homo sapiens
  Heavy chain
EVQLVESGGGVVRPGGSLRLSCAASGFTFDDYGMSWVRQAPGKGLEWVSGINWNGGSTGYADSVKGRFTISRDIAKNSLYLQMNSLRAEDTALYHCARGEPYYYYYYGMDVWGQGTTVTVSSA

SEQ ID NO: 8228 - protein, 126 aa, Homo sapiens; identical to SEQ ID NO: 117
  Heavy chain

SEQ ID NO: 8229 - protein, 123 aa, Homo sapiens; identical to SEQ ID NO: 8161
  Heavy chain

SEQ ID NO: 8230 - protein, 123 aa, Homo sapiens; identical to SEQ ID NO: 8169
  Heavy chain

SEQ ID NO: 8231 - protein, 123 aa, Homo sapiens; identical to SEQ ID NO: 8153
  Heavy chain

SEQ ID NO: 8232 - protein, 123 aa, Homo sapiens; identical to SEQ ID NO: 8153
  Heavy chain

SEQ ID NO: 8233 - protein, 124 aa, Homo sapiens
  Heavy chain
QVQLVESGGGVVQPGRSLRLSCAASGFTFSGYGMHWVRQAPGKGLEWVARIWYDESNKSYADSVKGRFTISRDNSKNTLYLQMNSLRAEDTAVYYCARDRYYGSGSPLWFDPWGRGTLVTVSSA

SEQ ID NO: 8234 - protein, 123 aa, Homo sapiens
  Heavy chain
QVQLVESGGGVVQPGRSLRLSCAASGFTFSGYGMHWVRQAPGKGLEWVARIWYDESNKSYADSVKGRFTISRDNSKNTLYLQMNSLRAEDTAVYYCARDRYYGSGSPLWFDPWAGEPWSPSPQ

SEQ ID NO: 8235 - protein, 124 aa, Homo sapiens
  Heavy chain
QVQLVESGGGVVQPGRSLRLSCAASGFTFSGYGMHWVRQAPGKGLEWVARIWYDESNKSYADSVKGRFTISRDNSKNTLYLQMNSLRAEDTAVYYCARDRYYGAGSPLWFDPWGRGTLVTVSSA

SEQ ID NO: 8236 - protein, 124 aa, Homo sapiens
  Heavy chain
QVQLVESGGGVVQPGRSLRLSCAASGFTFSGYGMHWVRQAPGKGLEWVARIWYDESNKSYADSVKGRFTISRANSKNTLYLQMNSLRAEDTAVYSSARDRYYGSASPLWFDPWGLGTLVTVSSA

SEQ ID NO: 8237 - protein, 124 aa, Homo sapiens
  Heavy chain
QVQLVESGGGVVQPGRSLRLSCAASGFTFSGYGMHWVRQAPGKGLEWVARIWYDESNKSYADSVKGRFTISRDNSKNTLYLQMNSLRAEDTAVYYCARDRYYGSGSPLWFAPWGRGTLVTVASA

SEQ ID NO: 8238 - protein, 124 aa, Homo sapiens; identical to SEQ ID NO: 8233
  Heavy chain

SEQ ID NO: 8239 - protein, 124 aa, Homo sapiens
  Heavy chain
QVQLVESGGGVVQPGRSLRLSCAASGFTFSGYGMHWVRQAPGKGLEWVARIWYDESNKSYADSVKGRFTISRDNSKNTLYLQMNSLRAEDTAVYYCARDRYYGSGSPSWFDPWGRGTLVTVSSA

SEQ ID NO: 8240 - protein, 124 aa, Homo sapiens
  Heavy chain
QVQLVESGGGVVQPGRSLRLSCAASGFTFSGYGMHWVRQAPGKGLEWVARIWYDESNKSYADSVKGRFTISRDNSKNTLYLQMNSLRAEDTAVYYCARDRYYGSRSPLWFDPWGRGTLVTVSSA

SEQ ID NO: 8241 - protein, 124 aa, Homo sapiens
  Heavy chain
QVQLVESGGGVVQPGRSLRLSCAASGFTFSGYGMHWVRQAPGKGLEWVARIWYDESNKSYADSVKGRITISRDDSKNTLYLQMNSLRGADTAVYYCARERYYGSGSPLWFDPWGQGTLVTVSSA

SEQ ID NO: 8242 - protein, 119 aa, Homo sapiens; identical to SEQ ID NO: 107
  Heavy chain

SEQ ID NO: 8243 - protein, 119 aa, Homo sapiens; identical to SEQ ID NO: 107
  Heavy chain

SEQ ID NO: 8244 - protein, 119 aa, Homo sapiens; identical to SEQ ID NO: 107
  Heavy chain

SEQ ID NO: 8245 - protein, 119 aa, Homo sapiens; identical to SEQ ID NO: 106
  Heavy chain

SEQ ID NO: 8246 - protein, 118 aa, Homo sapiens; identical to SEQ ID NO: 113
  Heavy chain

SEQ ID NO: 8247 - protein, 119 aa, Homo sapiens; identical to SEQ ID NO: 124
  Heavy chain

SEQ ID NO: 8248 - protein, 119 aa, Homo sapiens
  Heavy chain
QVQLVESGGGVVQPGRSLRLSCAASGFTFSSYGMHWVRQAPGKGLEWVAVIWFDGTNKHYADSVKGRFTVSRDNSKNTLYLQMNSLRAEDTAVYYCARDTTVTCFDYWGQGTLVTVSSA

SEQ ID NO: 8249 - protein, 119 aa, Homo sapiens; identical to SEQ ID NO: 114
  Heavy chain

SEQ ID NO: 8250 - protein, 119 aa, Homo sapiens; identical to SEQ ID NO: 110
  Heavy chain

SEQ ID NO: 8251 - protein, 118 aa, Homo sapiens
  Heavy chain
QVQLQESGPGLVKPSETLSLTCTVSGGSISSYYWSWIRQPPGKGLEWIGYIHYSGSTNYNPSLKSRVTISVDTSKNQFSLKLNSVTAADTAVFYCARGGWELNFDYWGQGTLVTVSSA

SEQ ID NO: 8252 - protein, 123 aa, Homo sapiens; identical to SEQ ID NO: 8161
  Heavy chain

SEQ ID NO: 8253 - protein, 123 aa, Homo sapiens; identical to SEQ ID NO: 8169
  Heavy chain

SEQ ID NO: 8254 - protein, 123 aa, Homo sapiens; identical to SEQ ID NO: 8153
  Heavy chain

SEQ ID NO: 8255 - protein, 120 aa, Homo sapiens; identical to SEQ ID NO: 101
  Heavy chain

SEQ ID NO: 8256 - protein, 119 aa, Homo sapiens; identical to SEQ ID NO: 109
  Heavy chain

SEQ ID NO: 8257 - protein, 120 aa, Homo sapiens
  Heavy chain
QVQLVQSGAEVKKPGASVKVSCKASGFTFTSYDINWVRQATGQGLEWMGWMHPNSGITGYAQKFQGRVTMPRNTSISTAYMELSILSSEDTAVECCARYDYVSGSYDYWGQGTLVTVSSA

SEQ ID NO: 8258 - protein, 120 aa, Homo sapiens; identical to SEQ ID NO: 101
  Heavy chain

SEQ ID NO: 8259 - protein, 119 aa, Homo sapiens; identical to SEQ ID NO: 107
  Heavy chain

SEQ ID NO: 8260 - protein, 119 aa, Homo sapiens; identical to SEQ ID NO: 107
  Heavy chain

SEQ ID NO: 8261 - protein, 119 aa, Homo sapiens
  Heavy chain
QVQLQESGPGLVKPSETLSLTCTVSGGSISSYYWSWIRQPPGKGLEWVGYIFYSGSTNYNPSLKSRVTISVDTSKNQFSLKLSSVTAADTAVYFCARDNSHDGGIDYWGQGTLVTVSSA

SEQ ID NO: 8262 - protein, 119 aa, Homo sapiens
  Heavy chain
QVQLQESGPGLVKPSETLSLTCTVSGGSISSYYWSWIRQPPGKGLEWIGYIFYSGSTNYNPSLKSRVTISVATSKNQFSLELSSVTAADTAVYFCARDNSHDGGVDYCRQGTLVTVSSA

SEQ ID NO: 8263 - protein, 119 aa, Homo sapiens
  Heavy chain
QVQLQESGPGLVKPSETLSLTCTVSGGSISSYYWSWIRQPPGKGLEWIGYIFYSGSTNYNPSLKSRVTISVDTSKNQFSLKLSSVTAADTAVYFCARDNWHAGGVDYWGQGTLVTVSSA

SEQ ID NO: 8264 - protein, 119 aa, Homo sapiens
  Heavy chain
QVQLQESGPGLVKPSETLSLTCTVSGGSISSYYWSWIRQPPGKGLEWIGYIFYSGSTNYNPSLKSRVTISVDTSKNQFSLKLSSVTAADTAVYFCARDNWHDGGIDYWGQGTLVTVSSA

SEQ ID NO: 8265 - protein, 119 aa, Homo sapiens
  Heavy chain
QVQLQESGPGLVKPSETLSLTCTVSGGSISSYYWSWIRQPPGKGLEWIGYIFYSGSTNYNPSLKSRVTISVDTSKNQFSLKLSSVTAADTAVYFCARDNWHDGGVAYWGQGTLVTVSSA

SEQ ID NO: 8266 - protein, 119 aa, Homo sapiens
  Heavy chain
QVQLQESGPGLVKPSETLSLTCTVSGGSISSYYWSWIRQPPGKGLEWIGYIFYSGSTNYNPSLKSRVTISVDTSKNQFSRKLSSVTAADTAVYVCARDNWHDGGVDSWGQGTLVTVSSA

SEQ ID NO: 8267 - protein, 119 aa, Homo sapiens; identical to SEQ ID NO: 107
  Heavy chain

SEQ ID NO: 8268 - protein, 119 aa, Homo sapiens
  Heavy chain
QVQLQESGPGLVKPSETLSLTCTVSGGSISSYYWSWIRQPPGKGLEWIGYIFYSGSTNYNPSLKSRVTISSDTAKNQFSLKRSSVTAEDTAGYCCARENWHDGGVDYWGQGTLVGGAPA

SEQ ID NO: 8269 - protein, 119 aa, Homo sapiens
  Heavy chain
QVQLQESGPGLVKPSETLSLTCTVSGGSISSYYWSWIRQPPGKGLEWIGYIFYSGSTNYNPSLKSRVTIAVDTAKNQYSRKLSTVTAADTAVYVCARHNWHDGGVDYRGQGTLVTVCPA

SEQ ID NO: 8270 - protein, 119 aa, Homo sapiens
  Heavy chain
QVQLQESGPGLVKPSETLSLTCTVSGGSISSYYWSWIRQPPGKGLEWIGYIFYSGSTNYNPSLKSRVTISVATSKNQCSLKLSSVTAADTAVYFCARYNWHDGGVDYWGQGTLVTVSSA

SEQ ID NO: 8271 - protein, 119 aa, Homo sapiens
  Heavy chain
QVQLQESGPGLVKPSGTLSLTCTVSGGSISSYYWSWIRQPPGKGLEWIGYIFYSGSTNYNPSLKSRVTISVDTSKNQFFLKLSSVTAADTALYFCASDNWHDGGIDYWGQGTLVTVTSA

SEQ ID NO: 8272 - protein, 119 aa, Homo sapiens
  Heavy chain
QVQLQESGPGLVKPSETLSLTCTVSGGSISSYFWSWIRQPPGKGLEWIGYIFYSGSTNYNPSLKSRVTIAVDTSKNQFSLKLSSVTAADTAVYFCATDNWHDGGVDYWAQGTLVTVSTA

SEQ ID NO: 8273 - protein, 119 aa, Homo sapiens
  Heavy chain
QVQLVESGGGVVQPGRSLRLSCAASGFTFSSYGMHWVRQAPGKGLEWVAVIWYDGTNKKYADSVKGRFTISRDNSENTLYLQMNSLRAEDTAVYYCARDRTAVSFDYWGQGTLVTVSSA

SEQ ID NO: 8274 - protein, 119 aa, Homo sapiens
  Heavy chain
QVQLVESGGGVVQPGRSLRLSCAASGFTFSSFGMHWVRQAPGQGLEWVAVIWYDGSTKYYADSVKGRFTISRDNSKNTLYLQMNSLRAEDTAVYYCARDVTRTPFDYWGQGTLVTVSSA

SEQ ID NO: 8275 - protein, 123 aa, Homo sapiens; identical to SEQ ID NO: 8161
  Heavy chain

SEQ ID NO: 8276 - protein, 123 aa, Homo sapiens; identical to SEQ ID NO: 8169
  Heavy chain

SEQ ID NO: 8277 - protein, 118 aa, Homo sapiens
  Heavy chain
QVQLVESGGGVVQPGRSLRLSCAASGFTFSSYDMHWVRQGPGKGLEWVTVIWSDGSHKYYADSVKGRFTISRDNSKNTLYLQMNSLRAEDTAVYYCAGGSCYGFDYWGQGTLVTVSSA

SEQ ID NO: 8278 - protein, 118 aa, Homo sapiens
  Heavy chain
QVQLVESGGGVVQPGKSLRLSCAASGFTFSNYDMHWVRQAPGKGLEWVAVIWYDGSNKYYADSVKGRFTISRDNSKNTLYLQMNSLRAEDTAVYYCAGGSSYGFDYWGQGTLVTVSSA

SEQ ID NO: 8279 - protein, 118 aa, Homo sapiens
  Heavy chain
QVQLVESGGGVVQPGRSLRLSCAASGFTFSSYDMHWVRQGPGKGLEWVTVIWSDGSHKYYADSVKGRFTISRDNSKNTLYLQMNSLRAEDTAVYYCAGGSWYGFDYWGQGTLVTVSSA

SEQ ID NO: 8280 - protein, 119 aa, Homo sapiens; identical to SEQ ID NO: 8264
  Heavy chain

SEQ ID NO: 8281 - protein, 119 aa, Homo sapiens; identical to SEQ ID NO: 107
  Heavy chain

SEQ ID NO: 8282 - protein, 127 aa, Homo sapiens; identical to SEQ ID NO: 121
  Heavy chain

SEQ ID NO: 8283 - protein, 123 aa, Homo sapiens; identical to SEQ ID NO: 8169
  Heavy chain

SEQ ID NO: 8284 - protein, 123 aa, Homo sapiens; identical to SEQ ID NO: 8153
  Heavy chain

SEQ ID NO: 8285 - protein, 127 aa, Homo sapiens; identical to SEQ ID NO: 119
  Heavy chain

SEQ ID NO: 8286 - protein, 120 aa, Homo sapiens; identical to SEQ ID NO: 101
  Heavy chain

SEQ ID NO: 8287 - protein, 123 aa, Homo sapiens; identical to SEQ ID NO: 8153
  Heavy chain

SEQ ID NO: 8288 - protein, 123 aa, Homo sapiens; identical to SEQ ID NO: 8169
  Heavy chain

SEQ ID NO: 8289 - protein, 121 aa, Homo sapiens; identical to SEQ ID NO: 118
  Heavy chain

SEQ ID NO: 8290 - protein, 119 aa, Homo sapiens
  Heavy chain
QVQLVESGGGVVQPGRSLRLSCAASGFTFSNYGMHWVRQAPGEGLEWVAIIWFDGSNKYYADSVKGRFTISRDNSKNTLHLQMNSLRAEDTAVYYCAREHSSGWFNYWGQGTLVTVSSA

SEQ ID NO: 8291 - protein, 118 aa, Homo sapiens; identical to SEQ ID NO: 8277
  Heavy chain

SEQ ID NO: 8292 - protein, 118 aa, Homo sapiens; identical to SEQ ID NO: 8278
  Heavy chain

SEQ ID NO: 8293 - protein, 118 aa, Homo sapiens; identical to SEQ ID NO: 8279
  Heavy chain

SEQ ID NO: 8294 - protein, 121 aa, Homo sapiens
  Heavy chain
QVQLVQSGAEVKKPGASVKVSCKASGYTFTSYGISWVRQAPGQGLEWMGWISAYNGNTNYAQKLQGRVTMTTDTSTSTAYMELRSLRSDDTAVYYCARAFYYGSWYFDYWGQGTLVTVSSA

SEQ ID NO: 8295 - protein, 121 aa, Homo sapiens
  Heavy chain
QVQLVQSGAEVKKPGDSVKVSCKASGYTFTSYGISWVRQAPGQGLEWMGWISAYNGNTNYAQKLQGRVTMTTDTSTSTAYMELRSLRSDDTAVYYCARGFDYGSWYFDYCGQGPLVSASSA

SEQ ID NO: 8296 - protein, 121 aa, Homo sapiens; identical to SEQ ID NO: 122
  Heavy chain

SEQ ID NO: 8297 - protein, 122 aa, Homo sapiens
  Heavy chain
EVQLVESGGGLVQPGGSLRLSCAASGFTFSRYDMSWVRQAPGKGLEWVSTISGSGGSTYYADSVKGRFTISRDNSKTTLYLQMISLRAEDTAVYYCAKAGFTMIAVAFDYWGQGTLVTVSSA

SEQ ID NO: 8298 - protein, 122 aa, Homo sapiens
  Heavy chain
EVQLVESGGGLVQPGGSLRLSCAASGFTFSRYDMSWVRQAPGKGLEWVSTISGSGGSTYYADSVKGRFTISRDNSRTTLYLQMISLRAEDTAVYYCAKAGFTMIVAAFDYWGQGTLVTVSSA

SEQ ID NO: 8299 - protein, 122 aa, Homo sapiens
  Heavy chain
EVQLVESGGGLVQPGGSLRLSCAASGFTFSRYDMSWVRQAPGKGLEWVSTISGSGGSTYYADSVKGRFTISRDNSKTTLYLQMISLRAEDTAVYYCAKAGFTMIVVAVDYWGQGTLVTVSSA

SEQ ID NO: 8300 - protein, 122 aa, Homo sapiens
  Heavy chain
EVQLVESGGGLVQPGGSLRLSCAASGFTFSRYDMSWVRQAPGKGLEWVSTISGSGGSTYYADSVKGRFTISRDNSKTTLYLQMISLRAEDTAVYYCAKAGFTTIVVAFDYWGQGTLVTVSSA

SEQ ID NO: 8301 - protein, 122 aa, Homo sapiens
  Heavy chain
EVQLVESGGGLVQPGGSLRLSCAASGFTFSRYDMSWVRQAPGKGLEWVSTISGSGGSTYYADSVKGRFTISRDNSKTTLYLQMISLRAEDTAVYYCAKAGLTMIVVAFDYWGQGTLVTVASA

SEQ ID NO: 8302 - protein, 122 aa, Homo sapiens
  Heavy chain
EVQLVESGGGLVQPGGSLRLSCAASGFTFSRYDMSWVRQAPGKGLEWVSTISGSGGSTYYADSVKGRFTIARDNSKTTLYLQMISLRAEDTAVYYCAKAGVTMIVVAFDYWGQGTLVTVSSA

SEQ ID NO: 8303 - protein, 119 aa, Homo sapiens; identical to SEQ ID NO: 107
  Heavy chain

SEQ ID NO: 8304 - protein, 119 aa, Homo sapiens; identical to SEQ ID NO: 107
  Heavy chain

SEQ ID NO: 8305 - protein, 120 aa, Homo sapiens; identical to SEQ ID NO: 125
  Heavy chain

SEQ ID NO: 8306 - protein, 6 aa, Homo sapiens
  Light chain CDR1
QGIRND

SEQ ID NO: 8307 - protein, 7 aa, Homo sapiens
  Light chain CDR1
QSVSSSY

SEQ ID NO: 8308 - protein, 11 aa, Homo sapiens
  Light chain CDR1
QSLVYSDGNTY

SEQ ID NO: 8309 - protein, 6 aa, Homo sapiens
  Light chain CDR1
QGIRND

SEQ ID NO: 8310 - protein, 11 aa, Homo sapiens
  Light chain CDR1
QSLVYSDGNTY

SEQ ID NO: 8311 - protein, 6 aa, Homo sapiens
  Light chain CDR1
QGISNY

SEQ ID NO: 8312 - protein, 6 aa, Homo sapiens
  Light chain CDR1
QSIGSS

SEQ ID NO: 8313 - protein, 6 aa, Homo sapiens
  Light chain CDR1
QGIRND

SEQ ID NO: 8314 - protein, 7 aa, Homo sapiens
  Light chain CDR1
QSVSSSY

SEQ ID NO: 8315 - protein, 6 aa, Homo sapiens
  Light chain CDR1
QSIGSS

SEQ ID NO: 8316 - protein, 7 aa, Homo sapiens
  Light chain CDR1
QSVSSTY

SEQ ID NO: 8317 - protein, 6 aa, Homo sapiens
  Light chain CDR1
QGIRND

SEQ ID NO: 8318 - protein, 6 aa, Homo sapiens
  Light chain CDR1
QSIGSS

SEQ ID NO: 8319 - protein, 6 aa, Homo sapiens
  Light chain CDR1
QSIGSS

SEQ ID NO: 8320 - protein, 6 aa, Homo sapiens
  Light chain CDR1
QSIGSS

SEQ ID NO: 8321 - protein, 6 aa, Homo sapiens
  Light chain CDR1
QSIGSS

SEQ ID NO: 8322 - protein, 6 aa, Homo sapiens
  Light chain CDR1
QSIGSS

SEQ ID NO: 8323 - protein, 6 aa, Homo sapiens
  Light chain CDR1
QSIGSS

SEQ ID NO: 8324 - protein, 6 aa, Homo sapiens
  Light chain CDR1
QSIGSS

SEQ ID NO: 8325 - protein, 6 aa, Homo sapiens
  Light chain CDR1
QSIGSS

SEQ ID NO: 8326 - protein, 6 aa, Homo sapiens
  Light chain CDR1
QDIRND

SEQ ID NO: 8327 - protein, 6 aa, Homo sapiens
  Light chain CDR1
QGIRND

SEQ ID NO: 8328 - protein, 6 aa, Homo sapiens
  Light chain CDR1
QGIRND

SEQ ID NO: 8329 - protein, 6 aa, Homo sapiens
  Light chain CDR1
QGIRND

SEQ ID NO: 8330 - protein, 6 aa, Homo sapiens
  Light chain CDR1
QDIRND

SEQ ID NO: 8331 - protein, 6 aa, Homo sapiens
  Light chain CDR1
QDIRND

SEQ ID NO: 8332 - protein, 6 aa, Homo sapiens
  Light chain CDR1
QDIRND

SEQ ID NO: 8333 - protein, 6 aa, Homo sapiens
  Light chain CDR1
QDIRND

SEQ ID NO: 8334 - protein, 6 aa, Homo sapiens
  Light chain CDR1
QDIRND

SEQ ID NO: 8335 - protein, 6 aa, Homo sapiens
  Light chain CDR1
QDIRND

SEQ ID NO: 8336 - protein, 6 aa, Homo sapiens
  Light chain CDR1
QDIRND

SEQ ID NO: 8337 - protein, 6 aa, Homo sapiens
  Light chain CDR1
QDIRND

SEQ ID NO: 8338 - protein, 6 aa, Homo sapiens
  Light chain CDR1
QDIRND

SEQ ID NO: 8339 - protein, 6 aa, Homo sapiens
  Light chain CDR1
QDIRND

SEQ ID NO: 8340 - protein, 6 aa, Homo sapiens
  Light chain CDR1
QDIRND

SEQ ID NO: 8341 - protein, 6 aa, Homo sapiens
  Light chain CDR1
QDIRND

SEQ ID NO: 8342 - protein, 6 aa, Homo sapiens
  Light chain CDR1
QDIRND

SEQ ID NO: 8343 - protein, 6 aa, Homo sapiens
  Light chain CDR1
QDIRND

SEQ ID NO: 8344 - protein, 6 aa, Homo sapiens
  Light chain CDR1
QDIRND

SEQ ID NO: 8345 - protein, 6 aa, Homo sapiens
  Light chain CDR1
QDIRND

SEQ ID NO: 8346 - protein, 6 aa, Homo sapiens
  Light chain CDR1
QDIRND

SEQ ID NO: 8347 - protein, 6 aa, Homo sapiens
  Light chain CDR1
QDIRND

SEQ ID NO: 8348 - protein, 6 aa, Homo sapiens
  Light chain CDR1
QDIRND

SEQ ID NO: 8349 - protein, 6 aa, Homo sapiens
  Light chain CDR1
QGIRND

SEQ ID NO: 8350 - protein, 6 aa, Homo sapiens
  Light chain CDR1
QGIRND

SEQ ID NO: 8351 - protein, 6 aa, Homo sapiens
  Light chain CDR1
QGIRND

SEQ ID NO: 8352 - protein, 6 aa, Homo sapiens
  Light chain CDR1
QGIRND

SEQ ID NO: 8353 - protein, 6 aa, Homo sapiens
  Light chain CDR1
QGIRND

SEQ ID NO: 8354 - protein, 6 aa, Homo sapiens
  Light chain CDR1
QGIRND

SEQ ID NO: 8355 - protein, 6 aa, Homo sapiens
  Light chain CDR1
QGIRND

SEQ ID NO: 8356 - protein, 6 aa, Homo sapiens
  Light chain CDR1
QGIRND

SEQ ID NO: 8357 - protein, 6 aa, Homo sapiens
  Light chain CDR1
QGIRDD

SEQ ID NO: 8358 - protein, 6 aa, Homo sapiens
  Light chain CDR1
QGIRDD

SEQ ID NO: 8359 - protein, 6 aa, Homo sapiens
  Light chain CDR1
QGIRND

SEQ ID NO: 8360 - protein, 6 aa, Homo sapiens
  Light chain CDR1
QGIRND

SEQ ID NO: 8361 - protein, 6 aa, Homo sapiens
  Light chain CDR1
QGIRND

SEQ ID NO: 8362 - protein, 6 aa, Homo sapiens
  Light chain CDR1
QGIRND

SEQ ID NO: 8363 - protein, 6 aa, Homo sapiens
  Light chain CDR1
QGIRND

SEQ ID NO: 8364 - protein, 6 aa, Homo sapiens
  Light chain CDR1
QGIRND

SEQ ID NO: 8365 - protein, 6 aa, Homo sapiens
  Light chain CDR1
QGIRND

SEQ ID NO: 8366 - protein, 6 aa, Homo sapiens
  Light chain CDR1
QGIRND

SEQ ID NO: 8367 - protein, 6 aa, Homo sapiens
  Light chain CDR1
QGIRND

SEQ ID NO: 8368 - protein, 6 aa, Homo sapiens
  Light chain CDR1
QGIRND

SEQ ID NO: 8369 - protein, 6 aa, Homo sapiens
  Light chain CDR1
QGIRND

SEQ ID NO: 8370 - protein, 6 aa, Homo sapiens
  Light chain CDR1
QGIRND

SEQ ID NO: 8371 - protein, 6 aa, Homo sapiens
  Light chain CDR1
QGIRND

SEQ ID NO: 8372 - protein, 6 aa, Homo sapiens
  Light chain CDR1
QGIRND

SEQ ID NO: 8373 - protein, 6 aa, Homo sapiens
  Light chain CDR1
QGIRND

SEQ ID NO: 8374 - protein, 6 aa, Homo sapiens
  Light chain CDR1
QGIRND

SEQ ID NO: 8375 - protein, 6 aa, Homo sapiens
  Light chain CDR1
QGIRND

SEQ ID NO: 8376 - protein, 6 aa, Homo sapiens
  Light chain CDR1
QGIRND

SEQ ID NO: 8377 - protein, 6 aa, Homo sapiens
  Light chain CDR1
QGIRND

SEQ ID NO: 8378 - protein, 6 aa, Homo sapiens
  Light chain CDR1
QGIRND

SEQ ID NO: 8379 - protein, 6 aa, Homo sapiens
  Light chain CDR1
QGIRND

SEQ ID NO: 8380 - protein, 6 aa, Homo sapiens
  Light chain CDR1
QGIGSD

SEQ ID NO: 8381 - protein, 6 aa, Homo sapiens
  Light chain CDR1
QGIRND

SEQ ID NO: 8382 - protein, 11 aa, Homo sapiens
  Light chain CDR1
QSLVYSDGNTY

SEQ ID NO: 8383 - protein, 11 aa, Homo sapiens
  Light chain CDR1
QSLVYSDGNTY

SEQ ID NO: 8384 - protein, 11 aa, Homo sapiens
  Light chain CDR1
QSLVYSDGNTY

SEQ ID NO: 8385 - protein, 11 aa, Homo sapiens
  Light chain CDR1
QSLVYSDGNTY

SEQ ID NO: 8386 - protein, 6 aa, Homo sapiens
  Light chain CDR1
QGISNY

SEQ ID NO: 8387 - protein, 6 aa, Homo sapiens
  Light chain CDR1
QGIGNY

SEQ ID NO: 8388 - protein, 6 aa, Homo sapiens
  Light chain CDR1
QGIGNY

SEQ ID NO: 8389 - protein, 6 aa, Homo sapiens
  Light chain CDR1
QGIGNY

SEQ ID NO: 8390 - protein, 6 aa, Homo sapiens
  Light chain CDR1
QGIGNY

SEQ ID NO: 8391 - protein, 6 aa, Homo sapiens
  Light chain CDR1
QGIGNY

SEQ ID NO: 8392 - protein, 6 aa, Homo sapiens
  Light chain CDR1
QGIGNY

SEQ ID NO: 8393 - protein, 6 aa, Homo sapiens
  Light chain CDR1
QGIGNY

SEQ ID NO: 8394 - protein, 6 aa, Homo sapiens
  Light chain CDR1
QGIGNY

SEQ ID NO: 8395 - protein, 7 aa, Homo sapiens
  Light chain CDR1
QSVSSSY

SEQ ID NO: 8396 - protein, 7 aa, Homo sapiens
  Light chain CDR1
QSVSSSY

SEQ ID NO: 8397 - protein, 7 aa, Homo sapiens
  Light chain CDR1
QSVSSSY

SEQ ID NO: 8398 - protein, 7 aa, Homo sapiens
  Light chain CDR1
QSVSSSY

SEQ ID NO: 8399 - protein, 7 aa, Homo sapiens
  Light chain CDR1
QSVSSSY

SEQ ID NO: 8400 - protein, 7 aa, Homo sapiens
  Light chain CDR1
QSVSSSH

SEQ ID NO: 8401 - protein, 7 aa, Homo sapiens
  Light chain CDR1
QSVSSNY

SEQ ID NO: 8402 - protein, 7 aa, Homo sapiens
  Light chain CDR1
QSVSSSY

SEQ ID NO: 8403 - protein, 7 aa, Homo sapiens
  Light chain CDR1
QSVSSSY

SEQ ID NO: 8404 - protein, 7 aa, Homo sapiens
  Light chain CDR1
QSVSSSY

SEQ ID NO: 8405 - protein, 7 aa, Homo sapiens
  Light chain CDR1
QSVSSSY

SEQ ID NO: 8406 - protein, 7 aa, Homo sapiens
  Light chain CDR1
QSVSSSY

SEQ ID NO: 8407 - protein, 7 aa, Homo sapiens
  Light chain CDR1
QSVSSSY

SEQ ID NO: 8408 - protein, 7 aa, Homo sapiens
  Light chain CDR1
QSVSSSY

SEQ ID NO: 8409 - protein, 7 aa, Homo sapiens
  Light chain CDR1
QSVSSSY

SEQ ID NO: 8410 - protein, 7 aa, Homo sapiens
  Light chain CDR1
QSVSSSY

SEQ ID NO: 8411 - protein, 7 aa, Homo sapiens
  Light chain CDR1
QSVSSSY

SEQ ID NO: 8412 - protein, 7 aa, Homo sapiens
  Light chain CDR1
QSVSSSY

SEQ ID NO: 8413 - protein, 7 aa, Homo sapiens
  Light chain CDR1
QSVSSSY

SEQ ID NO: 8414 - protein, 7 aa, Homo sapiens
  Light chain CDR1
QSVSSSY

SEQ ID NO: 8415 - protein, 7 aa, Homo sapiens
  Light chain CDR1
QSVSSSY

SEQ ID NO: 8416 - protein, 7 aa, Homo sapiens
  Light chain CDR1
QSVSSSY

SEQ ID NO: 8417 - protein, 7 aa, Homo sapiens
  Light chain CDR1
QSVSSSY

SEQ ID NO: 8418 - protein, 7 aa, Homo sapiens
  Light chain CDR1
QSVSSSY

SEQ ID NO: 8419 - protein, 7 aa, Homo sapiens
  Light chain CDR1
QSVSSSY

SEQ ID NO: 8420 - protein, 7 aa, Homo sapiens
  Light chain CDR1
QSVSSSY

SEQ ID NO: 8421 - protein, 7 aa, Homo sapiens
  Light chain CDR1
QSVSSSY

SEQ ID NO: 8422 - protein, 7 aa, Homo sapiens
  Light chain CDR1
QSVSSSY

SEQ ID NO: 8423 - protein, 7 aa, Homo sapiens
  Light chain CDR1
QSVSSSY

SEQ ID NO: 8424 - protein, 7 aa, Homo sapiens
  Light chain CDR1
QSVSSSY

SEQ ID NO: 8425 - protein, 7 aa, Homo sapiens
  Light chain CDR1
QSVSSSY

SEQ ID NO: 8426 - protein, 7 aa, Homo sapiens
  Light chain CDR1
QSVSSSY

SEQ ID NO: 8427 - protein, 7 aa, Homo sapiens
  Light chain CDR1
QSVSSSY

SEQ ID NO: 8428 - protein, 6 aa, Homo sapiens
  Light chain CDR1
QGIRND

SEQ ID NO: 8429 - protein, 6 aa, Homo sapiens
  Light chain CDR1
QGIRND

SEQ ID NO: 8430 - protein, 6 aa, Homo sapiens
  Light chain CDR1
QGIRND

SEQ ID NO: 8431 - protein, 6 aa, Homo sapiens
  Light chain CDR1
QGIRND

SEQ ID NO: 8432 - protein, 6 aa, Homo sapiens
  Light chain CDR1
QGIRND

SEQ ID NO: 8433 - protein, 7 aa, Homo sapiens
  Light chain CDR1
QSVSSSY

SEQ ID NO: 8434 - protein, 7 aa, Homo sapiens
  Light chain CDR1
QSVSSSY

SEQ ID NO: 8435 - protein, 6 aa, Homo sapiens
  Light chain CDR1
QGISSY

SEQ ID NO: 8436 - protein, 6 aa, Homo sapiens
  Light chain CDR1
QGISSY

SEQ ID NO: 8437 - protein, 6 aa, Homo sapiens
  Light chain CDR1
QGISSY

SEQ ID NO: 8438 - protein, 6 aa, Homo sapiens
  Light chain CDR1
QGISSY

SEQ ID NO: 8439 - protein, 6 aa, Homo sapiens
  Light chain CDR1
QSISSY

SEQ ID NO: 8440 - protein, 6 aa, Homo sapiens
  Light chain CDR1
QSISRY

SEQ ID NO: 8441 - protein, 7 aa, Homo sapiens
  Light chain CDR1
QSVSSSY

SEQ ID NO: 8442 - protein, 6 aa, Homo sapiens
  Light chain CDR1
QSVSSN

SEQ ID NO: 8443 - protein, 6 aa, Homo sapiens
  Light chain CDR1
QDISSW

SEQ ID NO: 8444 - protein, 6 aa, Homo sapiens
  Light chain CDR1
QGISSW

SEQ ID NO: 8445 - protein, 6 aa, Homo sapiens
  Light chain CDR1
QGISSW

SEQ ID NO: 8446 - protein, 6 aa, Homo sapiens
  Light chain CDR1
QGISSW

SEQ ID NO: 8447 - protein, 6 aa, Homo sapiens
  Light chain CDR1
QGISSW

SEQ ID NO: 8448 - protein, 6 aa, Homo sapiens
  Light chain CDR1
QGISSW

SEQ ID NO: 8449 - protein, 6 aa, Homo sapiens
  Light chain CDR1
QGISSW

SEQ ID NO: 8450 - protein, 6 aa, Homo sapiens
  Light chain CDR1
QGISNY

SEQ ID NO: 8451 - protein, 6 aa, Homo sapiens
  Light chain CDR1
QGISNY

SEQ ID NO: 8452 - protein, 6 aa, Homo sapiens
  Light chain CDR1
QGISNY

SEQ ID NO: 8453 - protein, 6 aa, Homo sapiens
  Light chain CDR1
QGISNY

SEQ ID NO: 8454 - protein, 6 aa, Homo sapiens
  Light chain CDR1
QGISNY

SEQ ID NO: 8455 - protein, 6 aa, Homo sapiens
  Light chain CDR1
QGISNY

SEQ ID NO: 8456 - protein, 7 aa, Homo sapiens
  Light chain CDR1
QSVSSSY

SEQ ID NO: 8457 - protein, 7 aa, Homo sapiens
  Light chain CDR1
QSVSSSY

SEQ ID NO: 8458 - protein, 7 aa, Homo sapiens
  Light chain CDR1
QSVSSSY

SEQ ID NO: 8459 - protein, 3 aa, Homo sapiens
  Light chain CDR2
AAS

SEQ ID NO: 8460 - protein, 3 aa, Homo sapiens
  Light chain CDR2
DAS

SEQ ID NO: 8461 - protein, 3 aa, Homo sapiens
  Light chain CDR2
KVS

SEQ ID NO: 8462 - protein, 3 aa, Homo sapiens
  Light chain CDR2
AAS

SEQ ID NO: 8463 - protein, 3 aa, Homo sapiens
  Light chain CDR2
KVS

SEQ ID NO: 8464 - protein, 3 aa, Homo sapiens
  Light chain CDR2
AAS

SEQ ID NO: 8465 - protein, 3 aa, Homo sapiens
  Light chain CDR2
YAS

SEQ ID NO: 8466 - protein, 3 aa, Homo sapiens
  Light chain CDR2
AAS

SEQ ID NO: 8467 - protein, 3 aa, Homo sapiens
  Light chain CDR2
DAS

SEQ ID NO: 8468 - protein, 10 aa, Homo sapiens
  Light chain CDR2
YTSQSISGVP

SEQ ID NO: 8469 - protein, 3 aa, Homo sapiens
  Light chain CDR2
GAS

SEQ ID NO: 8470 - protein, 3 aa, Homo sapiens
  Light chain CDR2
AAS

SEQ ID NO: 8471 - protein, 3 aa, Homo sapiens
  Light chain CDR2
YAS

SEQ ID NO: 8472 - protein, 3 aa, Homo sapiens
  Light chain CDR2
YAS

SEQ ID NO: 8473 - protein, 3 aa, Homo sapiens
  Light chain CDR2
YAS

SEQ ID NO: 8474 - protein, 3 aa, Homo sapiens
  Light chain CDR2
YAS

SEQ ID NO: 8475 - protein, 3 aa, Homo sapiens
  Light chain CDR2
YAS

SEQ ID NO: 8476 - protein, 3 aa, Homo sapiens
  Light chain CDR2
YAS

SEQ ID NO: 8477 - protein, 3 aa, Homo sapiens
  Light chain CDR2
YAS

SEQ ID NO: 8478 - protein, 10 aa, Homo sapiens
  Light chain CDR2
YTSQSISGVP

SEQ ID NO: 8479 - protein, 3 aa, Homo sapiens
  Light chain CDR2
AAS

SEQ ID NO: 8480 - protein, 3 aa, Homo sapiens
  Light chain CDR2
AAL

SEQ ID NO: 8481 - protein, 3 aa, Homo sapiens
  Light chain CDR2
AAS

SEQ ID NO: 8482 - protein, 3 aa, Homo sapiens
  Light chain CDR2
AAS

SEQ ID NO: 8483 - protein, 3 aa, Homo sapiens
  Light chain CDR2
AAS

SEQ ID NO: 8484 - protein, 3 aa, Homo sapiens
  Light chain CDR2
AAS

SEQ ID NO: 8485 - protein, 3 aa, Homo sapiens
  Light chain CDR2
AAS

SEQ ID NO: 8486 - protein, 3 aa, Homo sapiens
  Light chain CDR2
AAS

SEQ ID NO: 8487 - protein, 3 aa, Homo sapiens
  Light chain CDR2
AAS

SEQ ID NO: 8488 - protein, 3 aa, Homo sapiens
  Light chain CDR2
AAS

SEQ ID NO: 8489 - protein, 3 aa, Homo sapiens
  Light chain CDR2
AAS

SEQ ID NO: 8490 - protein, 3 aa, Homo sapiens
  Light chain CDR2
AAS

SEQ ID NO: 8491 - protein, 3 aa, Homo sapiens
  Light chain CDR2
AAS

SEQ ID NO: 8492 - protein, 3 aa, Homo sapiens
  Light chain CDR2
AAS

SEQ ID NO: 8493 - protein, 3 aa, Homo sapiens
  Light chain CDR2
AAS

SEQ ID NO: 8494 - protein, 3 aa, Homo sapiens
  Light chain CDR2
AAS

SEQ ID NO: 8495 - protein, 3 aa, Homo sapiens
  Light chain CDR2
AAS

SEQ ID NO: 8496 - protein, 3 aa, Homo sapiens
  Light chain CDR2
AAS

SEQ ID NO: 8497 - protein, 3 aa, Homo sapiens
  Light chain CDR2
AAS

SEQ ID NO: 8498 - protein, 3 aa, Homo sapiens
  Light chain CDR2
AAS

SEQ ID NO: 8499 - protein, 3 aa, Homo sapiens
  Light chain CDR2
AAS

SEQ ID NO: 8500 - protein, 3 aa, Homo sapiens
  Light chain CDR2
AAS

SEQ ID NO: 8501 - protein, 3 aa, Homo sapiens
  Light chain CDR2
AAS

SEQ ID NO: 8502 - protein, 3 aa, Homo sapiens
  Light chain CDR2
AAS

SEQ ID NO: 8503 - protein, 3 aa, Homo sapiens
  Light chain CDR2
AAS

SEQ ID NO: 8504 - protein, 3 aa, Homo sapiens
  Light chain CDR2
AAS

SEQ ID NO: 8505 - protein, 3 aa, Homo sapiens
  Light chain CDR2
AAS

SEQ ID NO: 8506 - protein, 3 aa, Homo sapiens
  Light chain CDR2
AAS

SEQ ID NO: 8507 - protein, 3 aa, Homo sapiens
  Light chain CDR2
AAS

SEQ ID NO: 8508 - protein, 3 aa, Homo sapiens
  Light chain CDR2
AAS

SEQ ID NO: 8509 - protein, 3 aa, Homo sapiens
  Light chain CDR2
AAS

SEQ ID NO: 8510 - protein, 3 aa, Homo sapiens
  Light chain CDR2
AAS

SEQ ID NO: 8511 - protein, 3 aa, Homo sapiens
  Light chain CDR2
AAS

SEQ ID NO: 8512 - protein, 3 aa, Homo sapiens
  Light chain CDR2
AAS

SEQ ID NO: 8513 - protein, 3 aa, Homo sapiens
  Light chain CDR2
AAS

SEQ ID NO: 8514 - protein, 3 aa, Homo sapiens
  Light chain CDR2
AAS

SEQ ID NO: 8515 - protein, 3 aa, Homo sapiens
  Light chain CDR2
AAS

SEQ ID NO: 8516 - protein, 3 aa, Homo sapiens
  Light chain CDR2
AAS

SEQ ID NO: 8517 - protein, 3 aa, Homo sapiens
  Light chain CDR2
AAS

SEQ ID NO: 8518 - protein, 3 aa, Homo sapiens
  Light chain CDR2
AAS

SEQ ID NO: 8519 - protein, 3 aa, Homo sapiens
  Light chain CDR2
AAS

SEQ ID NO: 8520 - protein, 3 aa, Homo sapiens
  Light chain CDR2
AAS

SEQ ID NO: 8521 - protein, 3 aa, Homo sapiens
  Light chain CDR2
AAS

SEQ ID NO: 8522 - protein, 3 aa, Homo sapiens
  Light chain CDR2
AAS

SEQ ID NO: 8523 - protein, 3 aa, Homo sapiens
  Light chain CDR2
AAS

SEQ ID NO: 8524 - protein, 3 aa, Homo sapiens
  Light chain CDR2
AAS

SEQ ID NO: 8525 - protein, 3 aa, Homo sapiens
  Light chain CDR2
AAS

SEQ ID NO: 8526 - protein, 3 aa, Homo sapiens
  Light chain CDR2
AAS

SEQ ID NO: 8527 - protein, 3 aa, Homo sapiens
  Light chain CDR2
AAS

SEQ ID NO: 8528 - protein, 3 aa, Homo sapiens
  Light chain CDR2
AAS

SEQ ID NO: 8529 - protein, 3 aa, Homo sapiens
  Light chain CDR2
AAS

SEQ ID NO: 8530 - protein, 3 aa, Homo sapiens
  Light chain CDR2
AAS

SEQ ID NO: 8531 - protein, 3 aa, Homo sapiens
  Light chain CDR2
AAS

SEQ ID NO: 8532 - protein, 3 aa, Homo sapiens
  Light chain CDR2
AAS

SEQ ID NO: 8533 - protein, 3 aa, Homo sapiens
  Light chain CDR2
AAS

SEQ ID NO: 8534 - protein, 3 aa, Homo sapiens
  Light chain CDR2
AAS

SEQ ID NO: 8535 - protein, 3 aa, Homo sapiens
  Light chain CDR2
KVS

SEQ ID NO: 8536 - protein, 3 aa, Homo sapiens
  Light chain CDR2
KVS

SEQ ID NO: 8537 - protein, 3 aa, Homo sapiens
  Light chain CDR2
KVS

SEQ ID NO: 8538 - protein, 3 aa, Homo sapiens
  Light chain CDR2
KVS

SEQ ID NO: 8539 - protein, 3 aa, Homo sapiens
  Light chain CDR2
AAS

SEQ ID NO: 8540 - protein, 3 aa, Homo sapiens
  Light chain CDR2
AAS

SEQ ID NO: 8541 - protein, 3 aa, Homo sapiens
  Light chain CDR2
AAS

SEQ ID NO: 8542 - protein, 3 aa, Homo sapiens
  Light chain CDR2
AAS

SEQ ID NO: 8543 - protein, 3 aa, Homo sapiens
  Light chain CDR2
AAS

SEQ ID NO: 8544 - protein, 3 aa, Homo sapiens
  Light chain CDR2
AAS

SEQ ID NO: 8545 - protein, 3 aa, Homo sapiens
  Light chain CDR2
AAS

SEQ ID NO: 8546 - protein, 3 aa, Homo sapiens
  Light chain CDR2
AAS

SEQ ID NO: 8547 - protein, 3 aa, Homo sapiens
  Light chain CDR2
AAS

SEQ ID NO: 8548 - protein, 3 aa, Homo sapiens
  Light chain CDR2
GAS

SEQ ID NO: 8549 - protein, 3 aa, Homo sapiens
  Light chain CDR2
GAS

SEQ ID NO: 8550 - protein, 3 aa, Homo sapiens
  Light chain CDR2
GAS

SEQ ID NO: 8551 - protein, 3 aa, Homo sapiens
  Light chain CDR2
GAS

SEQ ID NO: 8552 - protein, 3 aa, Homo sapiens
  Light chain CDR2
GAS

SEQ ID NO: 8553 - protein, 3 aa, Homo sapiens
  Light chain CDR2
GAS

SEQ ID NO: 8554 - protein, 3 aa, Homo sapiens
  Light chain CDR2
GAS

SEQ ID NO: 8555 - protein, 3 aa, Homo sapiens
  Light chain CDR2
GAS

SEQ ID NO: 8556 - protein, 3 aa, Homo sapiens
  Light chain CDR2
GAS

SEQ ID NO: 8557 - protein, 3 aa, Homo sapiens
  Light chain CDR2
GAS

SEQ ID NO: 8558 - protein, 3 aa, Homo sapiens
  Light chain CDR2
GAS

SEQ ID NO: 8559 - protein, 3 aa, Homo sapiens
  Light chain CDR2
GAS

SEQ ID NO: 8560 - protein, 3 aa, Homo sapiens
  Light chain CDR2
GAS

SEQ ID NO: 8561 - protein, 3 aa, Homo sapiens
  Light chain CDR2
GAS

SEQ ID NO: 8562 - protein, 3 aa, Homo sapiens
  Light chain CDR2
GAS

SEQ ID NO: 8563 - protein, 3 aa, Homo sapiens
  Light chain CDR2
GAS

SEQ ID NO: 8564 - protein, 3 aa, Homo sapiens
  Light chain CDR2
GAS

SEQ ID NO: 8565 - protein, 3 aa, Homo sapiens
  Light chain CDR2
GAS

SEQ ID NO: 8566 - protein, 3 aa, Homo sapiens
  Light chain CDR2
GAS

SEQ ID NO: 8567 - protein, 3 aa, Homo sapiens
  Light chain CDR2
GAS

SEQ ID NO: 8568 - protein, 3 aa, Homo sapiens
  Light chain CDR2
GAS

SEQ ID NO: 8569 - protein, 3 aa, Homo sapiens
  Light chain CDR2
GAS

SEQ ID NO: 8570 - protein, 3 aa, Homo sapiens
  Light chain CDR2
GAS

SEQ ID NO: 8571 - protein, 3 aa, Homo sapiens
  Light chain CDR2
GAS

SEQ ID NO: 8572 - protein, 3 aa, Homo sapiens
  Light chain CDR2
GAS

SEQ ID NO: 8573 - protein, 3 aa, Homo sapiens
  Light chain CDR2
GAS

SEQ ID NO: 8574 - protein, 3 aa, Homo sapiens
  Light chain CDR2
GAS

SEQ ID NO: 8575 - protein, 3 aa, Homo sapiens
  Light chain CDR2
GAS

SEQ ID NO: 8576 - protein, 3 aa, Homo sapiens
  Light chain CDR2
GAS

SEQ ID NO: 8577 - protein, 3 aa, Homo sapiens
  Light chain CDR2
GAS

SEQ ID NO: 8578 - protein, 3 aa, Homo sapiens
  Light chain CDR2
GAS

SEQ ID NO: 8579 - protein, 3 aa, Homo sapiens
  Light chain CDR2
GAS

SEQ ID NO: 8580 - protein, 3 aa, Homo sapiens
  Light chain CDR2
GAS

SEQ ID NO: 8581 - protein, 3 aa, Homo sapiens
  Light chain CDR2
AAS

SEQ ID NO: 8582 - protein, 3 aa, Homo sapiens
  Light chain CDR2
AAS

SEQ ID NO: 8583 - protein, 3 aa, Homo sapiens
  Light chain CDR2
DAS

SEQ ID NO: 8584 - protein, 3 aa, Homo sapiens
  Light chain CDR2
DAS

SEQ ID NO: 8585 - protein, 3 aa, Homo sapiens
  Light chain CDR2
DAS

SEQ ID NO: 8586 - protein, 3 aa, Homo sapiens
  Light chain CDR2
GAS

SEQ ID NO: 8587 - protein, 3 aa, Homo sapiens
  Light chain CDR2
GAS

SEQ ID NO: 8588 - protein, 3 aa, Homo sapiens
  Light chain CDR2
AAS

SEQ ID NO: 8589 - protein, 3 aa, Homo sapiens
  Light chain CDR2
AAS

SEQ ID NO: 8590 - protein, 3 aa, Homo sapiens
  Light chain CDR2
AAS

SEQ ID NO: 8591 - protein, 3 aa, Homo sapiens
  Light chain CDR2
DAS

SEQ ID NO: 8592 - protein, 3 aa, Homo sapiens
  Light chain CDR2
AAS

SEQ ID NO: 8593 - protein, 3 aa, Homo sapiens
  Light chain CDR2
AAS

SEQ ID NO: 8594 - protein, 3 aa, Homo sapiens
  Light chain CDR2
DAS

SEQ ID NO: 8595 - protein, 3 aa, Homo sapiens
  Light chain CDR2
GAS

SEQ ID NO: 8596 - protein, 3 aa, Homo sapiens
  Light chain CDR2
AAS

SEQ ID NO: 8597 - protein, 3 aa, Homo sapiens
  Light chain CDR2
AAS

SEQ ID NO: 8598 - protein, 3 aa, Homo sapiens
  Light chain CDR2
AAS

SEQ ID NO: 8599 - protein, 3 aa, Homo sapiens
  Light chain CDR2
AAS

SEQ ID NO: 8600 - protein, 3 aa, Homo sapiens
  Light chain CDR2
AAS

SEQ ID NO: 8601 - protein, 3 aa, Homo sapiens
  Light chain CDR2
AAS

SEQ ID NO: 8602 - protein, 3 aa, Homo sapiens
  Light chain CDR2
AAS

SEQ ID NO: 8603 - protein, 3 aa, Homo sapiens
  Light chain CDR2
AAS

SEQ ID NO: 8604 - protein, 3 aa, Homo sapiens
  Light chain CDR2
AAS

SEQ ID NO: 8605 - protein, 3 aa, Homo sapiens
  Light chain CDR2
AAS

SEQ ID NO: 8606 - protein, 3 aa, Homo sapiens
  Light chain CDR2
AAS

SEQ ID NO: 8607 - protein, 3 aa, Homo sapiens
  Light chain CDR2
AAS

SEQ ID NO: 8608 - protein, 3 aa, Homo sapiens
  Light chain CDR2
AAS

SEQ ID NO: 8609 - protein, 3 aa, Homo sapiens
  Light chain CDR2
GAS

SEQ ID NO: 8610 - protein, 3 aa, Homo sapiens
  Light chain CDR2
GAS

SEQ ID NO: 8611 - protein, 3 aa, Homo sapiens
  Light chain CDR2
GAS

SEQ ID NO: 8612 - protein, 9 aa, Homo sapiens
  Light chain CDR3
QQFNNYPYT

SEQ ID NO: 8613 - protein, 9 aa, Homo sapiens
  Light chain CDR3
QQYGSSPYT

SEQ ID NO: 8614 - protein, 11 aa, Homo sapiens
  Light chain CDR3
MQGTHWPPMYT

SEQ ID NO: 8615 - protein, 9 aa, Homo sapiens
  Light chain CDR3
LQYNSYPWT

SEQ ID NO: 8616 - protein, 9 aa, Homo sapiens
  Light chain CDR3
MQGTHWPLT

SEQ ID NO: 8617 - protein, 9 aa, Homo sapiens
  Light chain CDR3
QQYNSYPYT

SEQ ID NO: 8618 - protein, 9 aa, Homo sapiens
  Light chain CDR3
HQSSSLPFT

SEQ ID NO: 8619 - protein, 9 aa, Homo sapiens
  Light chain CDR3
LQDYNYPYT

SEQ ID NO: 8620 - protein, 9 aa, Homo sapiens
  Light chain CDR3
QQYGSSPYT

SEQ ID NO: 8621 - protein, 9 aa, Homo sapiens
  Light chain CDR3
HQSSSLPYT

SEQ ID NO: 8622 - protein, 9 aa, Homo sapiens
  Light chain CDR3
QQDYNLPPT

SEQ ID NO: 8623 - protein, 9 aa, Homo sapiens
  Light chain CDR3
QQLNSYPYT

SEQ ID NO: 8624 - protein, 9 aa, Homo sapiens
  Light chain CDR3
HQSSSLPHT

SEQ ID NO: 8625 - protein, 9 aa, Homo sapiens
  Light chain CDR3
HQSSSLPHT

SEQ ID NO: 8626 - protein, 9 aa, Homo sapiens
  Light chain CDR3
HQSSSLPQT

SEQ ID NO: 8627 - protein, 9 aa, Homo sapiens
  Light chain CDR3
HQSSSLPRT

SEQ ID NO: 8628 - protein, 9 aa, Homo sapiens
  Light chain CDR3
HQSSSLPRT

SEQ ID NO: 8629 - protein, 9 aa, Homo sapiens
  Light chain CDR3
HQSSSLPRT

SEQ ID NO: 8630 - protein, 8 aa, Homo sapiens
  Light chain CDR3
HQSSSLPT

SEQ ID NO: 8631 - protein, 9 aa, Homo sapiens
  Light chain CDR3
HQSSSLPYT

SEQ ID NO: 8632 - protein, 9 aa, Homo sapiens
  Light chain CDR3
LQDCNYPPT

SEQ ID NO: 8633 - protein, 9 aa, Homo sapiens
  Light chain CDR3
LQDHNYPYT

SEQ ID NO: 8634 - protein, 9 aa, Homo sapiens
  Light chain CDR3
LQDYNFPPT

SEQ ID NO: 8635 - protein, 9 aa, Homo sapiens
  Light chain CDR3
LQDYNFPPT

SEQ ID NO: 8636 - protein, 9 aa, Homo sapiens
  Light chain CDR3
LQDYNYPPT

SEQ ID NO: 8637 - protein, 9 aa, Homo sapiens
  Light chain CDR3
LQDYNYPPT

SEQ ID NO: 8638 - protein, 9 aa, Homo sapiens
  Light chain CDR3
LQDYNYPPT

SEQ ID NO: 8639 - protein, 9 aa, Homo sapiens
  Light chain CDR3
LQDYNYPPT

SEQ ID NO: 8640 - protein, 9 aa, Homo sapiens
  Light chain CDR3
LQDYNYPPT

SEQ ID NO: 8641 - protein, 9 aa, Homo sapiens
  Light chain CDR3
LQDYNYPPT

SEQ ID NO: 8642 - protein, 9 aa, Homo sapiens
  Light chain CDR3
LQDYNYPPT

SEQ ID NO: 8643 - protein, 9 aa, Homo sapiens
  Light chain CDR3
LQDYNYPPT

SEQ ID NO: 8644 - protein, 9 aa, Homo sapiens
  Light chain CDR3
LQDYNYPPT

SEQ ID NO: 8645 - protein, 9 aa, Homo sapiens
  Light chain CDR3
LQDYNYPPT

SEQ ID NO: 8646 - protein, 9 aa, Homo sapiens
  Light chain CDR3
LQDYNYPPT

SEQ ID NO: 8647 - protein, 9 aa, Homo sapiens
  Light chain CDR3
LQDYNYPPT

SEQ ID NO: 8648 - protein, 9 aa, Homo sapiens
  Light chain CDR3
LQDYNYPPT

SEQ ID NO: 8649 - protein, 9 aa, Homo sapiens
  Light chain CDR3
LQDYNYPPT

SEQ ID NO: 8650 - protein, 9 aa, Homo sapiens
  Light chain CDR3
LQDYNYPPT

SEQ ID NO: 8651 - protein, 9 aa, Homo sapiens
  Light chain CDR3
LQDYNYPPT

SEQ ID NO: 8652 - protein, 9 aa, Homo sapiens
  Light chain CDR3
LQDYNYPPT

SEQ ID NO: 8653 - protein, 9 aa, Homo sapiens
  Light chain CDR3
LQDYNYPPT

SEQ ID NO: 8654 - protein, 9 aa, Homo sapiens
  Light chain CDR3
LQDYNYPPT

SEQ ID NO: 8655 - protein, 9 aa, Homo sapiens
  Light chain CDR3
LQDYNYPRT

SEQ ID NO: 8656 - protein, 9 aa, Homo sapiens
  Light chain CDR3
LQDYNYPRT

SEQ ID NO: 8657 - protein, 9 aa, Homo sapiens
  Light chain CDR3
LQDYNYPRT

SEQ ID NO: 8658 - protein, 9 aa, Homo sapiens
  Light chain CDR3
LQDYNYPYT

SEQ ID NO: 8659 - protein, 9 aa, Homo sapiens
  Light chain CDR3
LQDYNYPYT

SEQ ID NO: 8660 - protein, 8 aa, Homo sapiens
  Light chain CDR3
LQDYNYRT

SEQ ID NO: 8661 - protein, 8 aa, Homo sapiens
  Light chain CDR3
LQDYNYRT

SEQ ID NO: 8662 - protein, 9 aa, Homo sapiens
  Light chain CDR3
LQHDSYPLT

SEQ ID NO: 8663 - protein, 9 aa, Homo sapiens
  Light chain CDR3
LQHNSYPFT

SEQ ID NO: 8664 - protein, 9 aa, Homo sapiens
  Light chain CDR3
LQHNSYPFT

SEQ ID NO: 8665 - protein, 9 aa, Homo sapiens
  Light chain CDR3
LQHNSYPLT

SEQ ID NO: 8666 - protein, 9 aa, Homo sapiens
  Light chain CDR3
LQHNSYPLT

SEQ ID NO: 8667 - protein, 9 aa, Homo sapiens
  Light chain CDR3
LQHNSYPLT

SEQ ID NO: 8668 - protein, 9 aa, Homo sapiens
  Light chain CDR3
LQHNSYPLT

SEQ ID NO: 8669 - protein, 9 aa, Homo sapiens
  Light chain CDR3
LQHNSYPLT

SEQ ID NO: 8670 - protein, 10 aa, Homo sapiens
  Light chain CDR3
LQHNSYPMFT

SEQ ID NO: 8671 - protein, 9 aa, Homo sapiens
  Light chain CDR3
LQHNSYPRT

SEQ ID NO: 8672 - protein, 9 aa, Homo sapiens
  Light chain CDR3
LQHNSYPRT

SEQ ID NO: 8673 - protein, 9 aa, Homo sapiens
  Light chain CDR3
LQHNSYPRT

SEQ ID NO: 8674 - protein, 9 aa, Homo sapiens
  Light chain CDR3
LQHNSYPRT

SEQ ID NO: 8675 - protein, 9 aa, Homo sapiens
  Light chain CDR3
LQHNSYPRT

SEQ ID NO: 8676 - protein, 9 aa, Homo sapiens
  Light chain CDR3
LQHNSYPRT

SEQ ID NO: 8677 - protein, 9 aa, Homo sapiens
  Light chain CDR3
LQHNSYPRT

SEQ ID NO: 8678 - protein, 9 aa, Homo sapiens
  Light chain CDR3
LQHNSYPRT

SEQ ID NO: 8679 - protein, 9 aa, Homo sapiens
  Light chain CDR3
LQHNSYPRT

SEQ ID NO: 8680 - protein, 9 aa, Homo sapiens
  Light chain CDR3
LQHNSYPYT

SEQ ID NO: 8681 - protein, 9 aa, Homo sapiens
  Light chain CDR3
LQHNSYPYT

SEQ ID NO: 8682 - protein, 9 aa, Homo sapiens
  Light chain CDR3
LQHNSYPYT

SEQ ID NO: 8683 - protein, 9 aa, Homo sapiens
  Light chain CDR3
LQHNSYPYT

SEQ ID NO: 8684 - protein, 9 aa, Homo sapiens
  Light chain CDR3
LQHNSYPYT

SEQ ID NO: 8685 - protein, 9 aa, Homo sapiens
  Light chain CDR3
LQHNSYPYT

SEQ ID NO: 8686 - protein, 9 aa, Homo sapiens
  Light chain CDR3
LQHNSYPYT

SEQ ID NO: 8687 - protein, 9 aa, Homo sapiens
  Light chain CDR3
LQHNTYPWT

SEQ ID NO: 8688 - protein, 11 aa, Homo sapiens
  Light chain CDR3
MQGTHWPPMYT

SEQ ID NO: 8689 - protein, 11 aa, Homo sapiens
  Light chain CDR3
MQGTHWPPMYT

SEQ ID NO: 8690 - protein, 11 aa, Homo sapiens
  Light chain CDR3
MQGTHWPPMYT

SEQ ID NO: 8691 - protein, 10 aa, Homo sapiens
  Light chain CDR3
MQGTHWPPYT

SEQ ID NO: 8692 - protein, 9 aa, Homo sapiens
  Light chain CDR3
QKYNSAPSN

SEQ ID NO: 8693 - protein, 9 aa, Homo sapiens
  Light chain CDR3
QKYNSAPST

SEQ ID NO: 8694 - protein, 9 aa, Homo sapiens
  Light chain CDR3
QKYNSAPST

SEQ ID NO: 8695 - protein, 9 aa, Homo sapiens
  Light chain CDR3
QKYNSAPST

SEQ ID NO: 8696 - protein, 9 aa, Homo sapiens
  Light chain CDR3
QKYNSAPST

SEQ ID NO: 8697 - protein, 9 aa, Homo sapiens
  Light chain CDR3
QKYNSAPST

SEQ ID NO: 8698 - protein, 9 aa, Homo sapiens
  Light chain CDR3
QKYNSAPST

SEQ ID NO: 8699 - protein, 9 aa, Homo sapiens
  Light chain CDR3
QKYNSAPST

SEQ ID NO: 8700 - protein, 9 aa, Homo sapiens
  Light chain CDR3
QKYNSAPST

SEQ ID NO: 8701 - protein, 8 aa, Homo sapiens
  Light chain CDR3
QQDCNLRT

SEQ ID NO: 8702 - protein, 8 aa, Homo sapiens
  Light chain CDR3
QQDYDLRT

SEQ ID NO: 8703 - protein, 8 aa, Homo sapiens
  Light chain CDR3
QQDYNFRT

SEQ ID NO: 8704 - protein, 8 aa, Homo sapiens
  Light chain CDR3
QQDYNLFT

SEQ ID NO: 8705 - protein, 8 aa, Homo sapiens
  Light chain CDR3
QQDYNLIT

SEQ ID NO: 8706 - protein, 8 aa, Homo sapiens
  Light chain CDR3
QQDYNLLT

SEQ ID NO: 8707 - protein, 9 aa, Homo sapiens
  Light chain CDR3
QQDYNLPFT

SEQ ID NO: 8708 - protein, 9 aa, Homo sapiens
  Light chain CDR3
QQDYNLPHT

SEQ ID NO: 8709 - protein, 9 aa, Homo sapiens
  Light chain CDR3
QQDYNLPHT

SEQ ID NO: 8710 - protein, 9 aa, Homo sapiens
  Light chain CDR3
QQDYNLPLT

SEQ ID NO: 8711 - protein, 10 aa, Homo sapiens
  Light chain CDR3
QQDYNLPPYT

SEQ ID NO: 8712 - protein, 10 aa, Homo sapiens
  Light chain CDR3
QQDYNLPPYT

SEQ ID NO: 8713 - protein, 10 aa, Homo sapiens
  Light chain CDR3
QQDYNLPPYT

SEQ ID NO: 8714 - protein, 9 aa, Homo sapiens
  Light chain CDR3
QQDYNLPYP

SEQ ID NO: 8715 - protein, 9 aa, Homo sapiens
  Light chain CDR3
QQDYNLPYT

SEQ ID NO: 8716 - protein, 9 aa, Homo sapiens
  Light chain CDR3
QQDYNLPYT

SEQ ID NO: 8717 - protein, 9 aa, Homo sapiens
  Light chain CDR3
QQDYNLPYT

SEQ ID NO: 8718 - protein, 8 aa, Homo sapiens
  Light chain CDR3
QQDYNLRA

SEQ ID NO: 8719 - protein, 8 aa, Homo sapiens
  Light chain CDR3
QQDYNLRP

SEQ ID NO: 8720 - protein, 8 aa, Homo sapiens
  Light chain CDR3
QQDYNLRT

SEQ ID NO: 8721 - protein, 8 aa, Homo sapiens
  Light chain CDR3
QQDYNLRT

SEQ ID NO: 8722 - protein, 8 aa, Homo sapiens
  Light chain CDR3
QQDYNLRT

SEQ ID NO: 8723 - protein, 8 aa, Homo sapiens
  Light chain CDR3
QQDYNLRT

SEQ ID NO: 8724 - protein, 8 aa, Homo sapiens
  Light chain CDR3
QQDYNLRT

SEQ ID NO: 8725 - protein, 8 aa, Homo sapiens
  Light chain CDR3
QQDYNLRT

SEQ ID NO: 8726 - protein, 8 aa, Homo sapiens
  Light chain CDR3
QQDYNLRT

SEQ ID NO: 8727 - protein, 8 aa, Homo sapiens
  Light chain CDR3
QQDYNLRT

SEQ ID NO: 8728 - protein, 8 aa, Homo sapiens
  Light chain CDR3
QQDYNLRT

SEQ ID NO: 8729 - protein, 8 aa, Homo sapiens
  Light chain CDR3
QQDYNLRT

SEQ ID NO: 8730 - protein, 8 aa, Homo sapiens
  Light chain CDR3
QQDYNLRT

SEQ ID NO: 8731 - protein, 8 aa, Homo sapiens
  Light chain CDR3
QQDYNLRT

SEQ ID NO: 8732 - protein, 8 aa, Homo sapiens
  Light chain CDR3
QQDYNLYT

SEQ ID NO: 8733 - protein, 8 aa, Homo sapiens
  Light chain CDR3
QQDYNLYT

SEQ ID NO: 8734 - protein, 9 aa, Homo sapiens
  Light chain CDR3
QQFNNYPYT

SEQ ID NO: 8735 - protein, 9 aa, Homo sapiens
  Light chain CDR3
QQFNNYPYT

SEQ ID NO: 8736 - protein, 8 aa, Homo sapiens
  Light chain CDR3
QQFNNYYT

SEQ ID NO: 8737 - protein, 8 aa, Homo sapiens
  Light chain CDR3
QQFNNYYT

SEQ ID NO: 8738 - protein, 8 aa, Homo sapiens
  Light chain CDR3
QQFNNYYT

SEQ ID NO: 8739 - protein, 8 aa, Homo sapiens
  Light chain CDR3
QQGYNLRT

SEQ ID NO: 8740 - protein, 8 aa, Homo sapiens
  Light chain CDR3
QQGYNLRT

SEQ ID NO: 8741 - protein, 9 aa, Homo sapiens
  Light chain CDR3
QQLNSYPFT

SEQ ID NO: 8742 - protein, 9 aa, Homo sapiens
  Light chain CDR3
QQLNSYPHT

SEQ ID NO: 8743 - protein, 9 aa, Homo sapiens
  Light chain CDR3
QQLNSYPHT

SEQ ID NO: 8744 - protein, 9 aa, Homo sapiens
  Light chain CDR3
QQLNTYPLT

SEQ ID NO: 8745 - protein, 9 aa, Homo sapiens
  Light chain CDR3
QQSYSTPIT

SEQ ID NO: 8746 - protein, 9 aa, Homo sapiens
  Light chain CDR3
QQSYSTPRT

SEQ ID NO: 8747 - protein, 9 aa, Homo sapiens
  Light chain CDR3
QQYGSSPYT

SEQ ID NO: 8748 - protein, 9 aa, Homo sapiens
  Light chain CDR3
QQYNNWPYT

SEQ ID NO: 8749 - protein, 9 aa, Homo sapiens
  Light chain CDR3
QQYNSCPPT

SEQ ID NO: 8750 - protein, 9 aa, Homo sapiens
  Light chain CDR3
QQYNSYPPT

SEQ ID NO: 8751 - protein, 9 aa, Homo sapiens
  Light chain CDR3
QQYNSYPPT

SEQ ID NO: 8752 - protein, 9 aa, Homo sapiens
  Light chain CDR3
QQYNSYPPT

SEQ ID NO: 8753 - protein, 9 aa, Homo sapiens
  Light chain CDR3
QQYNSYPPT

SEQ ID NO: 8754 - protein, 9 aa, Homo sapiens
  Light chain CDR3
QQYNSYPPT

SEQ ID NO: 8755 - protein, 9 aa, Homo sapiens
  Light chain CDR3
QQYNSYPPT

SEQ ID NO: 8756 - protein, 9 aa, Homo sapiens
  Light chain CDR3
QQYNSYPYT

SEQ ID NO: 8757 - protein, 9 aa, Homo sapiens
  Light chain CDR3
QQYNSYPYT

SEQ ID NO: 8758 - protein, 9 aa, Homo sapiens
  Light chain CDR3
QQYNSYPYT

SEQ ID NO: 8759 - protein, 9 aa, Homo sapiens
  Light chain CDR3
QQYNSYPYT

SEQ ID NO: 8760 - protein, 9 aa, Homo sapiens
  Light chain CDR3
QQYNSYPYT

SEQ ID NO: 8761 - protein, 9 aa, Homo sapiens
  Light chain CDR3
QQYNSYPYT

SEQ ID NO: 8762 - protein, 8 aa, Homo sapiens
  Light chain CDR3
QRDYNLRT

SEQ ID NO: 8763 - protein, 8 aa, Homo sapiens
  Light chain CDR3
RQDYNLRT

SEQ ID NO: 8764 - protein, 9 aa, Homo sapiens
  Light chain CDR3
QQDYYLPYT

SEQ ID NO: 8765 - protein, 8 aa, Homo sapiens
  Heavy chain CDR1
GFTFSDYY

SEQ ID NO: 8766 - protein, 8 aa, Homo sapiens
  Heavy chain CDR1
GFTFSDYY

SEQ ID NO: 8767 - protein, 8 aa, Homo sapiens
  Heavy chain CDR1
VYTLTELS

SEQ ID NO: 8768 - protein, 8 aa, Homo sapiens
  Heavy chain CDR1
GFTFSSYG

SEQ ID NO: 8769 - protein, 8 aa, Homo sapiens
  Heavy chain CDR1
GYTLTELS

SEQ ID NO: 8770 - protein, 8 aa, Homo sapiens
  Heavy chain CDR1
GFTFSRYD

SEQ ID NO: 8771 - protein, 8 aa, Homo sapiens
  Heavy chain CDR1
GFTFSSSG

SEQ ID NO: 8772 - protein, 8 aa, Homo sapiens
  Heavy chain CDR1
GFTFSSYD

SEQ ID NO: 8773 - protein, 8 aa, Homo sapiens
  Heavy chain CDR1
GFTFSSYA

SEQ ID NO: 8774 - protein, 8 aa, Homo sapiens
  Heavy chain CDR1
GFTFSDYY

SEQ ID NO: 8775 - protein, 8 aa, Homo sapiens
  Heavy chain CDR1
GFAFSSYG

SEQ ID NO: 8776 - protein, 8 aa, Homo sapiens
  Heavy chain CDR1
GFTFSDYY

SEQ ID NO: 8777 - protein, 8 aa, Homo sapiens
  Heavy chain CDR1
GFTFSDYY

SEQ ID NO: 8778 - protein, 8 aa, Homo sapiens
  Heavy chain CDR1
GFTFSNAW

SEQ ID NO: 8779 - protein, 8 aa, Homo sapiens
  Heavy chain CDR1
GFTFSDYY

SEQ ID NO: 8780 - protein, 8 aa, Homo sapiens
  Heavy chain CDR1
GFTFSSYA

SEQ ID NO: 8781 - protein, 8 aa, Homo sapiens
  Heavy chain CDR1
GFTFSDYY

SEQ ID NO: 8782 - protein, 8 aa, Homo sapiens
  Heavy chain CDR1
GFTFSDYY

SEQ ID NO: 8783 - protein, 8 aa, Homo sapiens
  Heavy chain CDR1
GFTFSDYY

SEQ ID NO: 8784 - protein, 8 aa, Homo sapiens
  Heavy chain CDR1
GFTFSDYY

SEQ ID NO: 8785 - protein, 8 aa, Homo sapiens
  Heavy chain CDR1
GFTFSNYG

SEQ ID NO: 8786 - protein, 8 aa, Homo sapiens
  Heavy chain CDR1
GFTFSSYD

SEQ ID NO: 8787 - protein, 8 aa, Homo sapiens
  Heavy chain CDR1
GFTFSSYG

SEQ ID NO: 8788 - protein, 8 aa, Homo sapiens
  Heavy chain CDR1
GFTFSSYG

SEQ ID NO: 8789 - protein, 8 aa, Homo sapiens
  Heavy chain CDR1
GFTFSSYG

SEQ ID NO: 8790 - protein, 8 aa, Homo sapiens
  Heavy chain CDR1
GFTFSSYG

SEQ ID NO: 8791 - protein, 8 aa, Homo sapiens
  Heavy chain CDR1
GFTFSNYG

SEQ ID NO: 8792 - protein, 8 aa, Homo sapiens
  Heavy chain CDR1
GFTFSNYG

SEQ ID NO: 8793 - protein, 8 aa, Homo sapiens
  Heavy chain CDR1
GFTFSNYC

SEQ ID NO: 8794 - protein, 8 aa, Homo sapiens
  Heavy chain CDR1
GFTFSNYG

SEQ ID NO: 8795 - protein, 8 aa, Homo sapiens
  Heavy chain CDR1
GFTFSNYG

SEQ ID NO: 8796 - protein, 8 aa, Homo sapiens
  Heavy chain CDR1
GFTFSSYG

SEQ ID NO: 8797 - protein, 8 aa, Homo sapiens
  Heavy chain CDR1
GFTFSSYG

SEQ ID NO: 8798 - protein, 8 aa, Homo sapiens
  Heavy chain CDR1
GFTFSSYG

SEQ ID NO: 8799 - protein, 8 aa, Homo sapiens
  Heavy chain CDR1
GFTFSNYG

SEQ ID NO: 8800 - protein, 8 aa, Homo sapiens
  Heavy chain CDR1
GFTFSNYG

SEQ ID NO: 8801 - protein, 8 aa, Homo sapiens
  Heavy chain CDR1
GFTFSSYG

SEQ ID NO: 8802 - protein, 8 aa, Homo sapiens
  Heavy chain CDR1
GFTFSNYG

SEQ ID NO: 8803 - protein, 8 aa, Homo sapiens
  Heavy chain CDR1
GFTFSNYG

SEQ ID NO: 8804 - protein, 8 aa, Homo sapiens
  Heavy chain CDR1
GFTFSSYG

SEQ ID NO: 8805 - protein, 8 aa, Homo sapiens
  Heavy chain CDR1
GFTFSGYG

SEQ ID NO: 8806 - protein, 8 aa, Homo sapiens
  Heavy chain CDR1
GFTFSSYG

SEQ ID NO: 8807 - protein, 8 aa, Homo sapiens
  Heavy chain CDR1
GFTFSSYG

SEQ ID NO: 8808 - protein, 8 aa, Homo sapiens
  Heavy chain CDR1
GFTFSSYA

SEQ ID NO: 8809 - protein, 8 aa, Homo sapiens
  Heavy chain CDR1
GFTFSDYY

SEQ ID NO: 8810 - protein, 8 aa, Homo sapiens
  Heavy chain CDR1
GFTFSDYY

SEQ ID NO: 8811 - protein, 8 aa, Homo sapiens
  Heavy chain CDR1
GFTFSSYG

SEQ ID NO: 8812 - protein, 8 aa, Homo sapiens
  Heavy chain CDR1
GFTFSSYD

SEQ ID NO: 8813 - protein, 8 aa, Homo sapiens
  Heavy chain CDR1
GFTFSDYY

SEQ ID NO: 8814 - protein, 8 aa, Homo sapiens
  Heavy chain CDR1
GFTFSDYY

SEQ ID NO: 8815 - protein, 10 aa, Homo sapiens
  Heavy chain CDR1
GGSFNRSNYY

SEQ ID NO: 8816 - protein, 8 aa, Homo sapiens
  Heavy chain CDR1
GFTFSDYY

SEQ ID NO: 8817 - protein, 8 aa, Homo sapiens
  Heavy chain CDR1
GFTFSDYY

SEQ ID NO: 8818 - protein, 8 aa, Homo sapiens
  Heavy chain CDR1
GFTFSSYA

SEQ ID NO: 8819 - protein, 8 aa, Homo sapiens
  Heavy chain CDR1
GFTFSDYY

SEQ ID NO: 8820 - protein, 8 aa, Homo sapiens
  Heavy chain CDR1
GFTFSDYY

SEQ ID NO: 8821 - protein, 10 aa, Homo sapiens
  Heavy chain CDR1
GGSISSSNYH

SEQ ID NO: 8822 - protein, 8 aa, Homo sapiens
  Heavy chain CDR1
GFTFSDYN

SEQ ID NO: 8823 - protein, 8 aa, Homo sapiens
  Heavy chain CDR1
GYTFTNYG

SEQ ID NO: 8824 - protein, 8 aa, Homo sapiens
  Heavy chain CDR1
GFTFSDYY

SEQ ID NO: 8825 - protein, 8 aa, Homo sapiens
  Heavy chain CDR1
GFTFSSYG

SEQ ID NO: 8826 - protein, 8 aa, Homo sapiens
  Heavy chain CDR1
GFTFSNYG

SEQ ID NO: 8827 - protein, 8 aa, Homo sapiens
  Heavy chain CDR1
GFTFSSYG

SEQ ID NO: 8828 - protein, 8 aa, Homo sapiens
  Heavy chain CDR1
GFTFSSYG

SEQ ID NO: 8829 - protein, 8 aa, Homo sapiens
  Heavy chain CDR1
GFTFSSYG

SEQ ID NO: 8830 - protein, 8 aa, Homo sapiens
  Heavy chain CDR1
GFTFSSYG

SEQ ID NO: 8831 - protein, 8 aa, Homo sapiens
  Heavy chain CDR1
GFTFSSYG

SEQ ID NO: 8832 - protein, 8 aa, Homo sapiens
  Heavy chain CDR1
GFTFSSYG

SEQ ID NO: 8833 - protein, 8 aa, Homo sapiens
  Heavy chain CDR1
GFTFSSYA

SEQ ID NO: 8834 - protein, 8 aa, Homo sapiens
  Heavy chain CDR1
GFTFSDYY

SEQ ID NO: 8835 - protein, 8 aa, Homo sapiens
  Heavy chain CDR1
GFTFSDYY

SEQ ID NO: 8836 - protein, 8 aa, Homo sapiens
  Heavy chain CDR1
GYTFTSYG

SEQ ID NO: 8837 - protein, 8 aa, Homo sapiens
  Heavy chain CDR1
GGSISSYY

SEQ ID NO: 8838 - protein, 8 aa, Homo sapiens
  Heavy chain CDR1
GGSISSYY

SEQ ID NO: 8839 - protein, 8 aa, Homo sapiens
  Heavy chain CDR1
GFTFDDYG

SEQ ID NO: 8840 - protein, 8 aa, Homo sapiens
  Heavy chain CDR1
GGSISGYS

SEQ ID NO: 8841 - protein, 8 aa, Homo sapiens
  Heavy chain CDR1
GFTFSSYA

SEQ ID NO: 8842 - protein, 8 aa, Homo sapiens
  Heavy chain CDR1
GFTFSDYY

SEQ ID NO: 8843 - protein, 8 aa, Homo sapiens
  Heavy chain CDR1
GFTFSDYY

SEQ ID NO: 8844 - protein, 8 aa, Homo sapiens
  Heavy chain CDR1
GFTFSDYY

SEQ ID NO: 8845 - protein, 8 aa, Homo sapiens
  Heavy chain CDR1
GFTFSGYG

SEQ ID NO: 8846 - protein, 8 aa, Homo sapiens
  Heavy chain CDR1
GFTFSGYG

SEQ ID NO: 8847 - protein, 8 aa, Homo sapiens
  Heavy chain CDR1
GFTFSGYG

SEQ ID NO: 8848 - protein, 8 aa, Homo sapiens
  Heavy chain CDR1
GFTFSGYG

SEQ ID NO: 8849 - protein, 8 aa, Homo sapiens
  Heavy chain CDR1
GFTFSGYG

SEQ ID NO: 8850 - protein, 8 aa, Homo sapiens
  Heavy chain CDR1
GFTFSGYG

SEQ ID NO: 8851 - protein, 8 aa, Homo sapiens
  Heavy chain CDR1
GFTFSGYG

SEQ ID NO: 8852 - protein, 8 aa, Homo sapiens
  Heavy chain CDR1
GFTFSGYG

SEQ ID NO: 8853 - protein, 8 aa, Homo sapiens
  Heavy chain CDR1
GFTFSGYG

SEQ ID NO: 8854 - protein, 8 aa, Homo sapiens
  Heavy chain CDR1
GGSISSYY

SEQ ID NO: 8855 - protein, 8 aa, Homo sapiens
  Heavy chain CDR1
GGSISSYY

SEQ ID NO: 8856 - protein, 8 aa, Homo sapiens
  Heavy chain CDR1
GGSISSYY

SEQ ID NO: 8857 - protein, 8 aa, Homo sapiens
  Heavy chain CDR1
GFTFSSYG

SEQ ID NO: 8858 - protein, 8 aa, Homo sapiens
  Heavy chain CDR1
GGSISSYY

SEQ ID NO: 8859 - protein, 10 aa, Homo sapiens
  Heavy chain CDR1
GGSISNSSSF

SEQ ID NO: 8860 - protein, 8 aa, Homo sapiens
  Heavy chain CDR1
GFTFSSYG

SEQ ID NO: 8861 - protein, 8 aa, Homo sapiens
  Heavy chain CDR1
GFTFSSYG

SEQ ID NO: 8862 - protein, 8 aa, Homo sapiens
  Heavy chain CDR1
GFTFSSYG

SEQ ID NO: 8863 - protein, 8 aa, Homo sapiens
  Heavy chain CDR1
GGSISSYY

SEQ ID NO: 8864 - protein, 8 aa, Homo sapiens
  Heavy chain CDR1
GFTFSSYA

SEQ ID NO: 8865 - protein, 8 aa, Homo sapiens
  Heavy chain CDR1
GFTFSDYY

SEQ ID NO: 8866 - protein, 8 aa, Homo sapiens
  Heavy chain CDR1
GFTFSDYY

SEQ ID NO: 8867 - protein, 8 aa, Homo sapiens
  Heavy chain CDR1
GFTFTSYD

SEQ ID NO: 8868 - protein, 8 aa, Homo sapiens
  Heavy chain CDR1
GFTFSSYG

SEQ ID NO: 8869 - protein, 8 aa, Homo sapiens
  Heavy chain CDR1
GFTFTSYD

SEQ ID NO: 8870 - protein, 8 aa, Homo sapiens
  Heavy chain CDR1
GFTFTSYD

SEQ ID NO: 8871 - protein, 8 aa, Homo sapiens
  Heavy chain CDR1
GGSISSYY

SEQ ID NO: 8872 - protein, 8 aa, Homo sapiens
  Heavy chain CDR1
GGSISSYY

SEQ ID NO: 8873 - protein, 8 aa, Homo sapiens
  Heavy chain CDR1
GGSISSYY

SEQ ID NO: 8874 - protein, 8 aa, Homo sapiens
  Heavy chain CDR1
GGSISSYY

SEQ ID NO: 8875 - protein, 8 aa, Homo sapiens
  Heavy chain CDR1
GGSISSYY

SEQ ID NO: 8876 - protein, 8 aa, Homo sapiens
  Heavy chain CDR1
GGSISSYY

SEQ ID NO: 8877 - protein, 8 aa, Homo sapiens
  Heavy chain CDR1
GGSISSYY

SEQ ID NO: 8878 - protein, 8 aa, Homo sapiens
  Heavy chain CDR1
GGSISSYY

SEQ ID NO: 8879 - protein, 8 aa, Homo sapiens
  Heavy chain CDR1
GGSISSYY

SEQ ID NO: 8880 - protein, 8 aa, Homo sapiens
  Heavy chain CDR1
GGSISSYY

SEQ ID NO: 8881 - protein, 8 aa, Homo sapiens
  Heavy chain CDR1
GGSISSYY

SEQ ID NO: 8882 - protein, 8 aa, Homo sapiens
  Heavy chain CDR1
GGSISSYY

SEQ ID NO: 8883 - protein, 8 aa, Homo sapiens
  Heavy chain CDR1
GGSISSYY

SEQ ID NO: 8884 - protein, 8 aa, Homo sapiens
  Heavy chain CDR1
GGSISSYF

SEQ ID NO: 8885 - protein, 8 aa, Homo sapiens
  Heavy chain CDR1
GFTFSSYG

SEQ ID NO: 8886 - protein, 8 aa, Homo sapiens
  Heavy chain CDR1
GFTFSSFG

SEQ ID NO: 8887 - protein, 8 aa, Homo sapiens
  Heavy chain CDR1
GFTFSSYA

SEQ ID NO: 8888 - protein, 8 aa, Homo sapiens
  Heavy chain CDR1
GFTFSDYY

SEQ ID NO: 8889 - protein, 8 aa, Homo sapiens
  Heavy chain CDR1
GFTFSSYD

SEQ ID NO: 8890 - protein, 8 aa, Homo sapiens
  Heavy chain CDR1
GFTFSNYD

SEQ ID NO: 8891 - protein, 8 aa, Homo sapiens
  Heavy chain CDR1
GFTFSSYD

SEQ ID NO: 8892 - protein, 8 aa, Homo sapiens
  Heavy chain CDR1
GGSISSYY

SEQ ID NO: 8893 - protein, 8 aa, Homo sapiens
  Heavy chain CDR1
GGSISSYY

SEQ ID NO: 8894 - protein, 8 aa, Homo sapiens
  Heavy chain CDR1
GFTFSSYG

SEQ ID NO: 8895 - protein, 8 aa, Homo sapiens
  Heavy chain CDR1
GFTFSDYY

SEQ ID NO: 8896 - protein, 8 aa, Homo sapiens
  Heavy chain CDR1
GFTFSDYY

SEQ ID NO: 8897 - protein, 8 aa, Homo sapiens
  Heavy chain CDR1
GFTFSSYG

SEQ ID NO: 8898 - protein, 8 aa, Homo sapiens
  Heavy chain CDR1
GFTFTSYD

SEQ ID NO: 8899 - protein, 8 aa, Homo sapiens
  Heavy chain CDR1
GFTFSDYY

SEQ ID NO: 8900 - protein, 8 aa, Homo sapiens
  Heavy chain CDR1
GFTFSDYY

SEQ ID NO: 8901 - protein, 8 aa, Homo sapiens
  Heavy chain CDR1
GFTFSSFA

SEQ ID NO: 8902 - protein, 8 aa, Homo sapiens
  Heavy chain CDR1
GFTFSNYG

SEQ ID NO: 8903 - protein, 8 aa, Homo sapiens
  Heavy chain CDR1
GFTFSSYD

SEQ ID NO: 8904 - protein, 8 aa, Homo sapiens
  Heavy chain CDR1
GFTFSNYD

SEQ ID NO: 8905 - protein, 8 aa, Homo sapiens
  Heavy chain CDR1
GFTFSSYD

SEQ ID NO: 8906 - protein, 8 aa, Homo sapiens
  Heavy chain CDR1
GYTFTSYG

SEQ ID NO: 8907 - protein, 8 aa, Homo sapiens
  Heavy chain CDR1
GYTFTSYG

SEQ ID NO: 8908 - protein, 8 aa, Homo sapiens
  Heavy chain CDR1
GYTFTSYG

SEQ ID NO: 8909 - protein, 8 aa, Homo sapiens
  Heavy chain CDR1
GFTFSRYD

SEQ ID NO: 8910 - protein, 8 aa, Homo sapiens
  Heavy chain CDR1
GFTFSRYD

SEQ ID NO: 8911 - protein, 8 aa, Homo sapiens
  Heavy chain CDR1
GFTFSRYD

SEQ ID NO: 8912 - protein, 8 aa, Homo sapiens
  Heavy chain CDR1
GFTFSRYD

SEQ ID NO: 8913 - protein, 8 aa, Homo sapiens
  Heavy chain CDR1
GFTFSRYD

SEQ ID NO: 8914 - protein, 8 aa, Homo sapiens
  Heavy chain CDR1
GFTFSRYD

SEQ ID NO: 8915 - protein, 8 aa, Homo sapiens
  Heavy chain CDR1
GGSISSYY

SEQ ID NO: 8916 - protein, 8 aa, Homo sapiens
  Heavy chain CDR1
GGSISSYY

SEQ ID NO: 8917 - protein, 8 aa, Homo sapiens
  Heavy chain CDR1
GFTFTSYD

SEQ ID NO: 8918 - protein, 8 aa, Homo sapiens
  Heavy chain CDR2
ISGSGGST

SEQ ID NO: 8919 - protein, 8 aa, Homo sapiens
  Heavy chain CDR2
ISGSGGST

SEQ ID NO: 8920 - protein, 8 aa, Homo sapiens
  Heavy chain CDR2
FDPEDGET

SEQ ID NO: 8921 - protein, 8 aa, Homo sapiens
  Heavy chain CDR2
IWYDGSNK

SEQ ID NO: 8922 - protein, 8 aa, Homo sapiens
  Heavy chain CDR2
FDPEDGET

SEQ ID NO: 8923 - protein, 8 aa, Homo sapiens
  Heavy chain CDR2
ISGSGGST

SEQ ID NO: 8924 - protein, 8 aa, Homo sapiens
  Heavy chain CDR2
IWYDGSDK

SEQ ID NO: 8925 - protein, 8 aa, Homo sapiens
  Heavy chain CDR2
MWYDGSNK

SEQ ID NO: 8926 - protein, 8 aa, Homo sapiens
  Heavy chain CDR2
ISGSGGST

SEQ ID NO: 8927 - protein, 8 aa, Homo sapiens
  Heavy chain CDR2
ISGSGGST

SEQ ID NO: 8928 - protein, 8 aa, Homo sapiens
  Heavy chain CDR2
IWFDGNNK

SEQ ID NO: 8929 - protein, 8 aa, Homo sapiens
  Heavy chain CDR2
ISGSGGST

SEQ ID NO: 8930 - protein, 8 aa, Homo sapiens
  Heavy chain CDR2
ISGSGGST

SEQ ID NO: 8931 - protein, 10 aa, Homo sapiens
  Heavy chain CDR2
IKSKTDGGTI

SEQ ID NO: 8932 - protein, 8 aa, Homo sapiens
  Heavy chain CDR2
ISGSGGST

SEQ ID NO: 8933 - protein, 8 aa, Homo sapiens
  Heavy chain CDR2
ISGSGGST

SEQ ID NO: 8934 - protein, 8 aa, Homo sapiens
  Heavy chain CDR2
ISGSGGST

SEQ ID NO: 8935 - protein, 8 aa, Homo sapiens
  Heavy chain CDR2
ISGSGGST

SEQ ID NO: 8936 - protein, 8 aa, Homo sapiens
  Heavy chain CDR2
ISGSGGST

SEQ ID NO: 8937 - protein, 8 aa, Homo sapiens
  Heavy chain CDR2
ISGSGGST

SEQ ID NO: 8938 - protein, 8 aa, Homo sapiens
  Heavy chain CDR2
IWFDGNTK

SEQ ID NO: 8939 - protein, 8 aa, Homo sapiens
  Heavy chain CDR2
MWYDGSNK

SEQ ID NO: 8940 - protein, 8 aa, Homo sapiens
  Heavy chain CDR2
IWFDGSNK

SEQ ID NO: 8941 - protein, 8 aa, Homo sapiens
  Heavy chain CDR2
IWFDGSNK

SEQ ID NO: 8942 - protein, 8 aa, Homo sapiens
  Heavy chain CDR2
IWSDGSNK

SEQ ID NO: 8943 - protein, 8 aa, Homo sapiens
  Heavy chain CDR2
IWHDGSSK

SEQ ID NO: 8944 - protein, 8 aa, Homo sapiens
  Heavy chain CDR2
IWFDGNTK

SEQ ID NO: 8945 - protein, 8 aa, Homo sapiens
  Heavy chain CDR2
IWFDGNTK

SEQ ID NO: 8946 - protein, 8 aa, Homo sapiens
  Heavy chain CDR2
IWFDGNTK

SEQ ID NO: 8947 - protein, 8 aa, Homo sapiens
  Heavy chain CDR2
IWFDGNTK

SEQ ID NO: 8948 - protein, 8 aa, Homo sapiens
  Heavy chain CDR2
IWFDGNTK

SEQ ID NO: 8949 - protein, 8 aa, Homo sapiens
  Heavy chain CDR2
IWHDGSSK

SEQ ID NO: 8950 - protein, 8 aa, Homo sapiens
  Heavy chain CDR2
IWHDGSSK

SEQ ID NO: 8951 - protein, 8 aa, Homo sapiens
  Heavy chain CDR2
IWYDGSNK

SEQ ID NO: 8952 - protein, 8 aa, Homo sapiens
  Heavy chain CDR2
IWFDGNTK

SEQ ID NO: 8953 - protein, 8 aa, Homo sapiens
  Heavy chain CDR2
IWFDGNTK

SEQ ID NO: 8954 - protein, 8 aa, Homo sapiens
  Heavy chain CDR2
IWHDGSSK

SEQ ID NO: 8955 - protein, 8 aa, Homo sapiens
  Heavy chain CDR2
IWFDGNTK

SEQ ID NO: 8956 - protein, 8 aa, Homo sapiens
  Heavy chain CDR2
IWFDGNTK

SEQ ID NO: 8957 - protein, 8 aa, Homo sapiens
  Heavy chain CDR2
IWHDGSSK

SEQ ID NO: 8958 - protein, 8 aa, Homo sapiens
  Heavy chain CDR2
IWFDGITK

SEQ ID NO: 8959 - protein, 8 aa, Homo sapiens
  Heavy chain CDR2
IWHDGSSK

SEQ ID NO: 8960 - protein, 8 aa, Homo sapiens
  Heavy chain CDR2
IWHDGSSK

SEQ ID NO: 8961 - protein, 8 aa, Homo sapiens
  Heavy chain CDR2
ISGSGGST

SEQ ID NO: 8962 - protein, 8 aa, Homo sapiens
  Heavy chain CDR2
ISGSGGST

SEQ ID NO: 8963 - protein, 8 aa, Homo sapiens
  Heavy chain CDR2
ISGSGGST

SEQ ID NO: 8964 - protein, 8 aa, Homo sapiens
  Heavy chain CDR2
IWSDGSNK

SEQ ID NO: 8965 - protein, 8 aa, Homo sapiens
  Heavy chain CDR2
MWYDGSNK

SEQ ID NO: 8966 - protein, 8 aa, Homo sapiens
  Heavy chain CDR2
ISGSGGST

SEQ ID NO: 8967 - protein, 8 aa, Homo sapiens
  Heavy chain CDR2
ISGSGGST

SEQ ID NO: 8968 - protein, 7 aa, Homo sapiens
  Heavy chain CDR2
IYYSGST

SEQ ID NO: 8969 - protein, 8 aa, Homo sapiens
  Heavy chain CDR2
ISGSGGST

SEQ ID NO: 8970 - protein, 8 aa, Homo sapiens
  Heavy chain CDR2
ISGSGGST

SEQ ID NO: 8971 - protein, 8 aa, Homo sapiens
  Heavy chain CDR2
ISGSGGST

SEQ ID NO: 8972 - protein, 8 aa, Homo sapiens
  Heavy chain CDR2
ISGSGGST

SEQ ID NO: 8973 - protein, 8 aa, Homo sapiens
  Heavy chain CDR2
ISGSGGST

SEQ ID NO: 8974 - protein, 7 aa, Homo sapiens
  Heavy chain CDR2
IYYSGST

SEQ ID NO: 8975 - protein, 8 aa, Homo sapiens
  Heavy chain CDR2
IWYDGNNK

SEQ ID NO: 8976 - protein, 8 aa, Homo sapiens
  Heavy chain CDR2
ISAYNGNT

SEQ ID NO: 8977 - protein, 8 aa, Homo sapiens
  Heavy chain CDR2
ISGSGGST

SEQ ID NO: 8978 - protein, 8 aa, Homo sapiens
  Heavy chain CDR2
IWYDGSNK

SEQ ID NO: 8979 - protein, 8 aa, Homo sapiens
  Heavy chain CDR2
IWFDGNTK

SEQ ID NO: 8980 - protein, 8 aa, Homo sapiens
  Heavy chain CDR2
IWYDGSNK

SEQ ID NO: 8981 - protein, 8 aa, Homo sapiens
  Heavy chain CDR2
IWYDGSNK

SEQ ID NO: 8982 - protein, 8 aa, Homo sapiens
  Heavy chain CDR2
IWYDGSNK

SEQ ID NO: 8983 - protein, 8 aa, Homo sapiens
  Heavy chain CDR2
IWYDGSNK

SEQ ID NO: 8984 - protein, 8 aa, Homo sapiens
  Heavy chain CDR2
IWYDGSNK

SEQ ID NO: 8985 - protein, 8 aa, Homo sapiens
  Heavy chain CDR2
IWYDGSNK

SEQ ID NO: 8986 - protein, 8 aa, Homo sapiens
  Heavy chain CDR2
ISGSGGST

SEQ ID NO: 8987 - protein, 8 aa, Homo sapiens
  Heavy chain CDR2
ISGSGGST

SEQ ID NO: 8988 - protein, 8 aa, Homo sapiens
  Heavy chain CDR2
ISGSGGST

SEQ ID NO: 8989 - protein, 8 aa, Homo sapiens
  Heavy chain CDR2
ISAYNGST

SEQ ID NO: 8990 - protein, 7 aa, Homo sapiens
  Heavy chain CDR2
IYYSGST

SEQ ID NO: 8991 - protein, 7 aa, Homo sapiens
  Heavy chain CDR2
IYYSGST

SEQ ID NO: 8992 - protein, 8 aa, Homo sapiens
  Heavy chain CDR2
INWNGGST

SEQ ID NO: 8993 - protein, 7 aa, Homo sapiens
  Heavy chain CDR2
IYYSGST

SEQ ID NO: 8994 - protein, 8 aa, Homo sapiens
  Heavy chain CDR2
ISGSGGST

SEQ ID NO: 8995 - protein, 8 aa, Homo sapiens
  Heavy chain CDR2
ISGSGGST

SEQ ID NO: 8996 - protein, 8 aa, Homo sapiens
  Heavy chain CDR2
ISGSGGST

SEQ ID NO: 8997 - protein, 8 aa, Homo sapiens
  Heavy chain CDR2
ISGSGGST

SEQ ID NO: 8998 - protein, 8 aa, Homo sapiens
  Heavy chain CDR2
IWYDESNK

SEQ ID NO: 8999 - protein, 8 aa, Homo sapiens
  Heavy chain CDR2
IWYDESNK

SEQ ID NO: 9000 - protein, 8 aa, Homo sapiens
  Heavy chain CDR2
IWYDESNK

SEQ ID NO: 9001 - protein, 8 aa, Homo sapiens
  Heavy chain CDR2
IWYDESNK

SEQ ID NO: 9002 - protein, 8 aa, Homo sapiens
  Heavy chain CDR2
IWYDESNK

SEQ ID NO: 9003 - protein, 8 aa, Homo sapiens
  Heavy chain CDR2
IWYDESNK

SEQ ID NO: 9004 - protein, 8 aa, Homo sapiens
  Heavy chain CDR2
IWYDESNK

SEQ ID NO: 9005 - protein, 8 aa, Homo sapiens
  Heavy chain CDR2
IWYDESNK

SEQ ID NO: 9006 - protein, 8 aa, Homo sapiens
  Heavy chain CDR2
IWYDESNK

SEQ ID NO: 9007 - protein, 7 aa, Homo sapiens
  Heavy chain CDR2
IFYSGST

SEQ ID NO: 9008 - protein, 7 aa, Homo sapiens
  Heavy chain CDR2
IFYSGST

SEQ ID NO: 9009 - protein, 7 aa, Homo sapiens
  Heavy chain CDR2
IFYSGST

SEQ ID NO: 9010 - protein, 8 aa, Homo sapiens
  Heavy chain CDR2
IWFDGSNK

SEQ ID NO: 9011 - protein, 7 aa, Homo sapiens
  Heavy chain CDR2
IHYSGST

SEQ ID NO: 9012 - protein, 7 aa, Homo sapiens
  Heavy chain CDR2
IYYSGST

SEQ ID NO: 9013 - protein, 8 aa, Homo sapiens
  Heavy chain CDR2
IWFDGTNK

SEQ ID NO: 9014 - protein, 8 aa, Homo sapiens
  Heavy chain CDR2
IWYDGSVK

SEQ ID NO: 9015 - protein, 8 aa, Homo sapiens
  Heavy chain CDR2
IWYDGINK

SEQ ID NO: 9016 - protein, 7 aa, Homo sapiens
  Heavy chain CDR2
IHYSGST

SEQ ID NO: 9017 - protein, 8 aa, Homo sapiens
  Heavy chain CDR2
ISGSGGST

SEQ ID NO: 9018 - protein, 8 aa, Homo sapiens
  Heavy chain CDR2
ISGSGGST

SEQ ID NO: 9019 - protein, 8 aa, Homo sapiens
  Heavy chain CDR2
ISGSGGST

SEQ ID NO: 9020 - protein, 8 aa, Homo sapiens
  Heavy chain CDR2
MHPNSGIT

SEQ ID NO: 9021 - protein, 8 aa, Homo sapiens
  Heavy chain CDR2
IWFDGNNK

SEQ ID NO: 9022 - protein, 8 aa, Homo sapiens
  Heavy chain CDR2
MHPNSGIT

SEQ ID NO: 9023 - protein, 8 aa, Homo sapiens
  Heavy chain CDR2
MHPNSGIT

SEQ ID NO: 9024 - protein, 7 aa, Homo sapiens
  Heavy chain CDR2
IFYSGST

SEQ ID NO: 9025 - protein, 7 aa, Homo sapiens
  Heavy chain CDR2
IFYSGST

SEQ ID NO: 9026 - protein, 7 aa, Homo sapiens
  Heavy chain CDR2
IFYSGST

SEQ ID NO: 9027 - protein, 7 aa, Homo sapiens
  Heavy chain CDR2
IFYSGST

SEQ ID NO: 9028 - protein, 7 aa, Homo sapiens
  Heavy chain CDR2
IFYSGST

SEQ ID NO: 9029 - protein, 7 aa, Homo sapiens
  Heavy chain CDR2
IFYSGST

SEQ ID NO: 9030 - protein, 7 aa, Homo sapiens
  Heavy chain CDR2
IFYSGST

SEQ ID NO: 9031 - protein, 7 aa, Homo sapiens
  Heavy chain CDR2
IFYSGST

SEQ ID NO: 9032 - protein, 7 aa, Homo sapiens
  Heavy chain CDR2
IFYSGST

SEQ ID NO: 9033 - protein, 7 aa, Homo sapiens
  Heavy chain CDR2
IFYSGST

SEQ ID NO: 9034 - protein, 7 aa, Homo sapiens
  Heavy chain CDR2
IFYSGST

SEQ ID NO: 9035 - protein, 7 aa, Homo sapiens
  Heavy chain CDR2
IFYSGST

SEQ ID NO: 9036 - protein, 7 aa, Homo sapiens
  Heavy chain CDR2
IFYSGST

SEQ ID NO: 9037 - protein, 7 aa, Homo sapiens
  Heavy chain CDR2
IFYSGST

SEQ ID NO: 9038 - protein, 8 aa, Homo sapiens
  Heavy chain CDR2
IWYDGTNK

SEQ ID NO: 9039 - protein, 8 aa, Homo sapiens
  Heavy chain CDR2
IWYDGSTK

SEQ ID NO: 9040 - protein, 8 aa, Homo sapiens
  Heavy chain CDR2
ISGSGGST

SEQ ID NO: 9041 - protein, 8 aa, Homo sapiens
  Heavy chain CDR2
ISGSGGST

SEQ ID NO: 9042 - protein, 8 aa, Homo sapiens
  Heavy chain CDR2
IWSDGSHK

SEQ ID NO: 9043 - protein, 8 aa, Homo sapiens
  Heavy chain CDR2
IWYDGSNK

SEQ ID NO: 9044 - protein, 8 aa, Homo sapiens
  Heavy chain CDR2
IWSDGSHK

SEQ ID NO: 9045 - protein, 7 aa, Homo sapiens
  Heavy chain CDR2
IFYSGST

SEQ ID NO: 9046 - protein, 7 aa, Homo sapiens
  Heavy chain CDR2
IFYSGST

SEQ ID NO: 9047 - protein, 8 aa, Homo sapiens
  Heavy chain CDR2
IWYDGSNK

SEQ ID NO: 9048 - protein, 8 aa, Homo sapiens
  Heavy chain CDR2
ISGSGGST

SEQ ID NO: 9049 - protein, 8 aa, Homo sapiens
  Heavy chain CDR2
ISGSGGST

SEQ ID NO: 9050 - protein, 8 aa, Homo sapiens
  Heavy chain CDR2
IWYDGSNK

SEQ ID NO: 9051 - protein, 8 aa, Homo sapiens
  Heavy chain CDR2
MHPNSGIT

SEQ ID NO: 9052 - protein, 8 aa, Homo sapiens
  Heavy chain CDR2
ISGSGGST

SEQ ID NO: 9053 - protein, 8 aa, Homo sapiens
  Heavy chain CDR2
ISGSGGST

SEQ ID NO: 9054 - protein, 8 aa, Homo sapiens
  Heavy chain CDR2
LWYDGISK

SEQ ID NO: 9055 - protein, 8 aa, Homo sapiens
  Heavy chain CDR2
IWFDGSNK

SEQ ID NO: 9056 - protein, 8 aa, Homo sapiens
  Heavy chain CDR2
IWSDGSHK

SEQ ID NO: 9057 - protein, 8 aa, Homo sapiens
  Heavy chain CDR2
IWYDGSNK

SEQ ID NO: 9058 - protein, 8 aa, Homo sapiens
  Heavy chain CDR2
IWSDGSHK

SEQ ID NO: 9059 - protein, 8 aa, Homo sapiens
  Heavy chain CDR2
ISAYNGNT

SEQ ID NO: 9060 - protein, 8 aa, Homo sapiens
  Heavy chain CDR2
ISAYNGNT

SEQ ID NO: 9061 - protein, 8 aa, Homo sapiens
  Heavy chain CDR2
ISAYNGNT

SEQ ID NO: 9062 - protein, 8 aa, Homo sapiens
  Heavy chain CDR2
ISGSGGST

SEQ ID NO: 9063 - protein, 8 aa, Homo sapiens
  Heavy chain CDR2
ISGSGGST

SEQ ID NO: 9064 - protein, 8 aa, Homo sapiens
  Heavy chain CDR2
ISGSGGST

SEQ ID NO: 9065 - protein, 8 aa, Homo sapiens
  Heavy chain CDR2
ISGSGGST

SEQ ID NO: 9066 - protein, 8 aa, Homo sapiens
  Heavy chain CDR2
ISGSGGST

SEQ ID NO: 9067 - protein, 8 aa, Homo sapiens
  Heavy chain CDR2
ISGSGGST

SEQ ID NO: 9068 - protein, 7 aa, Homo sapiens
  Heavy chain CDR2
IFYSGST

SEQ ID NO: 9069 - protein, 7 aa, Homo sapiens
  Heavy chain CDR2
IFYSGST

SEQ ID NO: 9070 - protein, 8 aa, Homo sapiens
  Heavy chain CDR2
MHPKSGIT

SEQ ID NO: 9071 - protein, 15 aa, Homo sapiens
  Heavy chain CDR3
AKVRWMVRGVGYFDL

SEQ ID NO: 9072 - protein, 15 aa, Homo sapiens
  Heavy chain CDR3
AKVRWMVRGVGYFDL

SEQ ID NO: 9073 - protein, 13 aa, Homo sapiens
  Heavy chain CDR3
ATGWGSYYNWFDP

SEQ ID NO: 9074 - protein, 15 aa, Homo sapiens
  Heavy chain CDR3
ARIAAAGYYYYGMDV

SEQ ID NO: 9075 - protein, 12 aa, Homo sapiens
  Heavy chain CDR3
ATLTGDRDYFDY

SEQ ID NO: 9076 - protein, 14 aa, Homo sapiens
  Heavy chain CDR3
AKAGFTMIVVAFDY

SEQ ID NO: 9077 - protein, 14 aa, Homo sapiens
  Heavy chain CDR3
ARDRLYSGDDFFDY

SEQ ID NO: 9078 - protein, 12 aa, Homo sapiens
  Heavy chain CDR3
ARDQWGSGAFDI

SEQ ID NO: 9079 - protein, 15 aa, Homo sapiens
  Heavy chain CDR3
AKGRWMVRGVGYFDL

SEQ ID NO: 9080 - protein, 15 aa, Homo sapiens
  Heavy chain CDR3
AKVRWMVRGVGYFDL

SEQ ID NO: 9081 - protein, 11 aa, Homo sapiens
  Heavy chain CDR3
ARDTTAASFDY

SEQ ID NO: 9082 - protein, 15 aa, Homo sapiens
  Heavy chain CDR3
AKVRWMVRGVGYFDL

SEQ ID NO: 9083 - protein, 15 aa, Homo sapiens
  Heavy chain CDR3
AKVRWMVRGVGYFDL

SEQ ID NO: 9084 - protein, 13 aa, Homo sapiens
  Heavy chain CDR3
TTKRYSGFDFLDY

SEQ ID NO: 9085 - protein, 15 aa, Homo sapiens
  Heavy chain CDR3
AKVRWMVRGVGYFDL

SEQ ID NO: 9086 - protein, 15 aa, Homo sapiens
  Heavy chain CDR3
AKGRWMVRGVGYFDL

SEQ ID NO: 9087 - protein, 15 aa, Homo sapiens
  Heavy chain CDR3
AKVRWMVRGAGYFDL

SEQ ID NO: 9088 - protein, 15 aa, Homo sapiens
  Heavy chain CDR3
AKVRWMVRGVGYFDL

SEQ ID NO: 9089 - protein, 15 aa, Homo sapiens
  Heavy chain CDR3
AKVRWMVRGVGYFDL

SEQ ID NO: 9090 - protein, 15 aa, Homo sapiens
  Heavy chain CDR3
AKVRWMVRGAGYFDL

SEQ ID NO: 9091 - protein, 11 aa, Homo sapiens
  Heavy chain CDR3
ARDITMVPMDV

SEQ ID NO: 9092 - protein, 12 aa, Homo sapiens
  Heavy chain CDR3
ARDQWGSGAFDI

SEQ ID NO: 9093 - protein, 11 aa, Homo sapiens
  Heavy chain CDR3
ARDITLVPMDV

SEQ ID NO: 9094 - protein, 11 aa, Homo sapiens
  Heavy chain CDR3
ARDTTLVPMDV

SEQ ID NO: 9095 - protein, 10 aa, Homo sapiens
  Heavy chain CDR3
ARDIAAAIDY

SEQ ID NO: 9096 - protein, 11 aa, Homo sapiens
  Heavy chain CDR3
ARDITAVPMDV

SEQ ID NO: 9097 - protein, 11 aa, Homo sapiens
  Heavy chain CDR3
ARDITIVPMDV

SEQ ID NO: 9098 - protein, 11 aa, Homo sapiens
  Heavy chain CDR3
ARDITMAPMDV

SEQ ID NO: 9099 - protein, 11 aa, Homo sapiens
  Heavy chain CDR3
ARDITMGPMDV

SEQ ID NO: 9100 - protein, 11 aa, Homo sapiens
  Heavy chain CDR3
ARDITMVPMDV

SEQ ID NO: 9101 - protein, 11 aa, Homo sapiens
  Heavy chain CDR3
ARDITTVPMDV

SEQ ID NO: 9102 - protein, 11 aa, Homo sapiens
  Heavy chain CDR3
ARDITVAPMDV

SEQ ID NO: 9103 - protein, 11 aa, Homo sapiens
  Heavy chain CDR3
ARDITVVPMDV

SEQ ID NO: 9104 - protein, 11 aa, Homo sapiens
  Heavy chain CDR3
ARDMDYFGLDV

SEQ ID NO: 9105 - protein, 11 aa, Homo sapiens
  Heavy chain CDR3
ARDNTMVPMDV

SEQ ID NO: 9106 - protein, 11 aa, Homo sapiens
  Heavy chain CDR3
ARDSTMVPMDV

SEQ ID NO: 9107 - protein, 11 aa, Homo sapiens
  Heavy chain CDR3
ARDTTAVPMDV

SEQ ID NO: 9108 - protein, 11 aa, Homo sapiens
  Heavy chain CDR3
ARDTTMGPMDV

SEQ ID NO: 9109 - protein, 11 aa, Homo sapiens
  Heavy chain CDR3
ARDTTMVPMDV

SEQ ID NO: 9110 - protein, 11 aa, Homo sapiens
  Heavy chain CDR3
ARDTTVAPMDV

SEQ ID NO: 9111 - protein, 11 aa, Homo sapiens
  Heavy chain CDR3
ARDTTVTPFDY

SEQ ID NO: 9112 - protein, 11 aa, Homo sapiens
  Heavy chain CDR3
ARDTTVVPMDA

SEQ ID NO: 9113 - protein, 11 aa, Homo sapiens
  Heavy chain CDR3
ARDTTVVPMDV

SEQ ID NO: 9114 - protein, 15 aa, Homo sapiens
  Heavy chain CDR3
AKGRWMVRGVGYFDL

SEQ ID NO: 9115 - protein, 15 aa, Homo sapiens
  Heavy chain CDR3
AKVRWMVRGAGYFDL

SEQ ID NO: 9116 - protein, 15 aa, Homo sapiens
  Heavy chain CDR3
AKVRWMVRGVGYFDL

SEQ ID NO: 9117 - protein, 10 aa, Homo sapiens
  Heavy chain CDR3
ARDIAAAIDY

SEQ ID NO: 9118 - protein, 12 aa, Homo sapiens
  Heavy chain CDR3
ARDQWGSGAIDI

SEQ ID NO: 9119 - protein, 15 aa, Homo sapiens
  Heavy chain CDR3
AKVRWMVRGAGYFDL

SEQ ID NO: 9120 - protein, 15 aa, Homo sapiens
  Heavy chain CDR3
AKVRWMVRGVGYFDL

SEQ ID NO: 9121 - protein, 22 aa, Homo sapiens
  Heavy chain CDR3
AREDIVVVPAAQPPHFYFGMDV

SEQ ID NO: 9122 - protein, 15 aa, Homo sapiens
  Heavy chain CDR3
AKVRWMVRGAGYFDL

SEQ ID NO: 9123 - protein, 15 aa, Homo sapiens
  Heavy chain CDR3
AKVRWMVRGVGYFDL

SEQ ID NO: 9124 - protein, 15 aa, Homo sapiens
  Heavy chain CDR3
AKGRWMVRGVGYFDL

SEQ ID NO: 9125 - protein, 15 aa, Homo sapiens
  Heavy chain CDR3
AKVRWMVRGAGYFDL

SEQ ID NO: 9126 - protein, 15 aa, Homo sapiens
  Heavy chain CDR3
AKVRWMVRGVGYFDL

SEQ ID NO: 9127 - protein, 22 aa, Homo sapiens
  Heavy chain CDR3
AREDIVVVPAAQPPHFHFGMDV

SEQ ID NO: 9128 - protein, 17 aa, Homo sapiens
  Heavy chain CDR3
ARGRAPYYDILTGFFDY

SEQ ID NO: 9129 - protein, 10 aa, Homo sapiens
  Heavy chain CDR3
ARSLTGLFDY

SEQ ID NO: 9130 - protein, 15 aa, Homo sapiens
  Heavy chain CDR3
AKVRWMVRGVGYFDL

SEQ ID NO: 9131 - protein, 11 aa, Homo sapiens
  Heavy chain CDR3
ARDFDWFGMDV

SEQ ID NO: 9132 - protein, 11 aa, Homo sapiens
  Heavy chain CDR3
ARDITMVPMDV

SEQ ID NO: 9133 - protein, 11 aa, Homo sapiens
  Heavy chain CDR3
ARDMDYFGLDA

SEQ ID NO: 9134 - protein, 11 aa, Homo sapiens
  Heavy chain CDR3
ARDMDYFGLDV

SEQ ID NO: 9135 - protein, 11 aa, Homo sapiens
  Heavy chain CDR3
ARDMDYFGMDV

SEQ ID NO: 9136 - protein, 11 aa, Homo sapiens
  Heavy chain CDR3
ARDMDYYGLDV

SEQ ID NO: 9137 - protein, 11 aa, Homo sapiens
  Heavy chain CDR3
ARDSDWFGMDV

SEQ ID NO: 9138 - protein, 11 aa, Homo sapiens
  Heavy chain CDR3
ARDTDYFGLDV

SEQ ID NO: 9139 - protein, 15 aa, Homo sapiens
  Heavy chain CDR3
AKGRWMVRGVGYFDL

SEQ ID NO: 9140 - protein, 15 aa, Homo sapiens
  Heavy chain CDR3
AKVRWMVRGAGYFDL

SEQ ID NO: 9141 - protein, 15 aa, Homo sapiens
  Heavy chain CDR3
AKVRWMVRGVGYFDL

SEQ ID NO: 9142 - protein, 19 aa, Homo sapiens
  Heavy chain CDR3
ARDDRIAVADYYYYFGMDV

SEQ ID NO: 9143 - protein, 19 aa, Homo sapiens
  Heavy chain CDR3
ARDDRIAVGPDYYYYGMDV

SEQ ID NO: 9144 - protein, 19 aa, Homo sapiens
  Heavy chain CDR3
ARDDRIAVGPYYYYYGMDV

SEQ ID NO: 9145 - protein, 15 aa, Homo sapiens
  Heavy chain CDR3
ARGEPYYYYYYGMDV

SEQ ID NO: 9146 - protein, 19 aa, Homo sapiens
  Heavy chain CDR3
ARDDGIAVAGYYFYYGLDV

SEQ ID NO: 9147 - protein, 15 aa, Homo sapiens
  Heavy chain CDR3
AKGRWMVRGVGYFDL

SEQ ID NO: 9148 - protein, 15 aa, Homo sapiens
  Heavy chain CDR3
AKVRWMVRGAGYFDL

SEQ ID NO: 9149 - protein, 15 aa, Homo sapiens
  Heavy chain CDR3
AKVRWMVRGVGYFDL

SEQ ID NO: 9150 - protein, 15 aa, Homo sapiens
  Heavy chain CDR3
AKVRWMVRGVGYFDL

SEQ ID NO: 9151 - protein, 16 aa, Homo sapiens
  Heavy chain CDR3
ARDRYYGSGSPLWFDP

SEQ ID NO: 9152 - protein, 5 aa, Homo sapiens
  Heavy chain CDR3
ARDRY

SEQ ID NO: 9153 - protein, 16 aa, Homo sapiens
  Heavy chain CDR3
ARDRYYGAGSPLWFDP

SEQ ID NO: 9154 - protein, 16 aa, Homo sapiens
  Heavy chain CDR3
ARDRYYGSASPLWFDP

SEQ ID NO: 9155 - protein, 16 aa, Homo sapiens
  Heavy chain CDR3
ARDRYYGSGSPLWFAP

SEQ ID NO: 9156 - protein, 16 aa, Homo sapiens
  Heavy chain CDR3
ARDRYYGSGSPLWFDP

SEQ ID NO: 9157 - protein, 16 aa, Homo sapiens
  Heavy chain CDR3
ARDRYYGSGSPSWFDP

SEQ ID NO: 9158 - protein, 16 aa, Homo sapiens
  Heavy chain CDR3
ARDRYYGSRSPLWFDP

SEQ ID NO: 9159 - protein, 16 aa, Homo sapiens
  Heavy chain CDR3
ARERYYGSGSPLWFDP

SEQ ID NO: 9160 - protein, 12 aa, Homo sapiens
  Heavy chain CDR3
ARDNWHDGGVDY

SEQ ID NO: 9161 - protein, 12 aa, Homo sapiens
  Heavy chain CDR3
ARDNWHDGGVDY

SEQ ID NO: 9162 - protein, 12 aa, Homo sapiens
  Heavy chain CDR3
ARDNWHDGGVDY

SEQ ID NO: 9163 - protein, 11 aa, Homo sapiens
  Heavy chain CDR3
ARDKTVSPFDI

SEQ ID NO: 9164 - protein, 11 aa, Homo sapiens
  Heavy chain CDR3
ARDRGIGAFDI

SEQ ID NO: 9165 - protein, 10 aa, Homo sapiens
  Heavy chain CDR3
ARLGFGGFDY

SEQ ID NO: 9166 - protein, 11 aa, Homo sapiens
  Heavy chain CDR3
ARDTTVTCFDY

SEQ ID NO: 9167 - protein, 11 aa, Homo sapiens
  Heavy chain CDR3
ARDRTGVPFDY

SEQ ID NO: 9168 - protein, 11 aa, Homo sapiens
  Heavy chain CDR3
ARDSTASPFDY

SEQ ID NO: 9169 - protein, 11 aa, Homo sapiens
  Heavy chain CDR3
ARGGWELNFDY

SEQ ID NO: 9170 - protein, 15 aa, Homo sapiens
  Heavy chain CDR3
AKGRWMVRGVGYFDL

SEQ ID NO: 9171 - protein, 15 aa, Homo sapiens
  Heavy chain CDR3
AKVRWMVRGAGYFDL

SEQ ID NO: 9172 - protein, 15 aa, Homo sapiens
  Heavy chain CDR3
AKVRWMVRGVGYFDL

SEQ ID NO: 9173 - protein, 12 aa, Homo sapiens
  Heavy chain CDR3
ARYYYVSGSYDY

SEQ ID NO: 9174 - protein, 11 aa, Homo sapiens
  Heavy chain CDR3
ARDVTTVPFDY

SEQ ID NO: 9175 - protein, 12 aa, Homo sapiens
  Heavy chain CDR3
ARYDYVSGSYDY

SEQ ID NO: 9176 - protein, 12 aa, Homo sapiens
  Heavy chain CDR3
ARYYYVSGSYDY

SEQ ID NO: 9177 - protein, 12 aa, Homo sapiens
  Heavy chain CDR3
ARDNWHDGGVDY

SEQ ID NO: 9178 - protein, 12 aa, Homo sapiens
  Heavy chain CDR3
ARDNWHDGGVDY

SEQ ID NO: 9179 - protein, 12 aa, Homo sapiens
  Heavy chain CDR3
ARDNSHDGGIDY

SEQ ID NO: 9180 - protein, 12 aa, Homo sapiens
  Heavy chain CDR3
ARDNSHDGGVDY

SEQ ID NO: 9181 - protein, 12 aa, Homo sapiens
  Heavy chain CDR3
ARDNWHAGGVDY

SEQ ID NO: 9182 - protein, 12 aa, Homo sapiens
  Heavy chain CDR3
ARDNWHDGGIDY

SEQ ID NO: 9183 - protein, 12 aa, Homo sapiens
  Heavy chain CDR3
ARDNWHDGGVAY

SEQ ID NO: 9184 - protein, 12 aa, Homo sapiens
  Heavy chain CDR3
ARDNWHDGGVDS

SEQ ID NO: 9185 - protein, 12 aa, Homo sapiens
  Heavy chain CDR3
ARDNWHDGGVDY

SEQ ID NO: 9186 - protein, 12 aa, Homo sapiens
  Heavy chain CDR3
ARENWHDGGVDY

SEQ ID NO: 9187 - protein, 12 aa, Homo sapiens
  Heavy chain CDR3
ARHNWHDGGVDY

SEQ ID NO: 9188 - protein, 12 aa, Homo sapiens
  Heavy chain CDR3
ARYNWHDGGVDY

SEQ ID NO: 9189 - protein, 12 aa, Homo sapiens
  Heavy chain CDR3
ASDNWHDGGIDY

SEQ ID NO: 9190 - protein, 12 aa, Homo sapiens
  Heavy chain CDR3
ATDNWHDGGVDY

SEQ ID NO: 9191 - protein, 11 aa, Homo sapiens
  Heavy chain CDR3
ARDRTAVSFDY

SEQ ID NO: 9192 - protein, 11 aa, Homo sapiens
  Heavy chain CDR3
ARDVTRTPFDY

SEQ ID NO: 9193 - protein, 15 aa, Homo sapiens
  Heavy chain CDR3
AKGRWMVRGVGYFDL

SEQ ID NO: 9194 - protein, 15 aa, Homo sapiens
  Heavy chain CDR3
AKVRWMVRGAGYFDL

SEQ ID NO: 9195 - protein, 10 aa, Homo sapiens
  Heavy chain CDR3
AGGSCYGFDY

SEQ ID NO: 9196 - protein, 10 aa, Homo sapiens
  Heavy chain CDR3
AGGSSYGFDY

SEQ ID NO: 9197 - protein, 10 aa, Homo sapiens
  Heavy chain CDR3
AGGSWYGFDY

SEQ ID NO: 9198 - protein, 12 aa, Homo sapiens
  Heavy chain CDR3
ARDNWHDGGIDY

SEQ ID NO: 9199 - protein, 12 aa, Homo sapiens
  Heavy chain CDR3
ARDNWHDGGVDY

SEQ ID NO: 9200 - protein, 19 aa, Homo sapiens
  Heavy chain CDR3
ARGGVNWNDVGYYYYGMDV

SEQ ID NO: 9201 - protein, 15 aa, Homo sapiens
  Heavy chain CDR3
AKVRWMVRGAGYFDL

SEQ ID NO: 9202 - protein, 15 aa, Homo sapiens
  Heavy chain CDR3
AKVRWMVRGVGYFDL

SEQ ID NO: 9203 - protein, 19 aa, Homo sapiens
  Heavy chain CDR3
ARGGAVAGTSWYYYYGMDV

SEQ ID NO: 9204 - protein, 12 aa, Homo sapiens
  Heavy chain CDR3
ARYYYVSGSYDY

SEQ ID NO: 9205 - protein, 15 aa, Homo sapiens
  Heavy chain CDR3
AKVRWMVRGVGYFDL

SEQ ID NO: 9206 - protein, 15 aa, Homo sapiens
  Heavy chain CDR3
AKVRWMVRGAGYFDL

SEQ ID NO: 9207 - protein, 13 aa, Homo sapiens
  Heavy chain CDR3
ARDVVGVHDAFDI

SEQ ID NO: 9208 - protein, 11 aa, Homo sapiens
  Heavy chain CDR3
AREHSSGWFNY

SEQ ID NO: 9209 - protein, 10 aa, Homo sapiens
  Heavy chain CDR3
AGGSCYGFDY

SEQ ID NO: 9210 - protein, 10 aa, Homo sapiens
  Heavy chain CDR3
AGGSSYGFDY

SEQ ID NO: 9211 - protein, 10 aa, Homo sapiens
  Heavy chain CDR3
AGGSWYGFDY

SEQ ID NO: 9212 - protein, 13 aa, Homo sapiens
  Heavy chain CDR3
ARAFYYGSWYFDY

SEQ ID NO: 9213 - protein, 13 aa, Homo sapiens
  Heavy chain CDR3
ARGFDYGSWYFDY

SEQ ID NO: 9214 - protein, 13 aa, Homo sapiens
  Heavy chain CDR3
ARGFYYGSWYFDY

SEQ ID NO: 9215 - protein, 14 aa, Homo sapiens
  Heavy chain CDR3
AKAGFTMIAVAFDY

SEQ ID NO: 9216 - protein, 14 aa, Homo sapiens
  Heavy chain CDR3
AKAGFTMIVAAFDY

SEQ ID NO: 9217 - protein, 14 aa, Homo sapiens
  Heavy chain CDR3
AKAGFTMIVVAVDY

SEQ ID NO: 9218 - protein, 14 aa, Homo sapiens
  Heavy chain CDR3
AKAGFTTIVVAFDY

SEQ ID NO: 9219 - protein, 14 aa, Homo sapiens
  Heavy chain CDR3
AKAGLTMIVVAFDY

SEQ ID NO: 9220 - protein, 14 aa, Homo sapiens
  Heavy chain CDR3
AKAGVTMIVVAFDY

SEQ ID NO: 9221 - protein, 12 aa, Homo sapiens
  Heavy chain CDR3
ARDNWHDGGVDY

SEQ ID NO: 9222 - protein, 12 aa, Homo sapiens
  Heavy chain CDR3
ARDNWHDGGVDY

SEQ ID NO: 9223 - protein, 12 aa, Homo sapiens
  Heavy chain CDR3
ARYNYVSGSYDY

SEQ ID NO: 9224 - protein, 5 aa, Artificial Sequence
  Description of Artificial Sequence: Synthetic peptide
  See specification as filed for detailed description of substitutions and preferred embodiments
GGGGS

SEQ ID NO: 9225 - protein, 5 aa, Homo sapiens
CPSCP

SEQ ID NO: 9226 - protein, 5 aa, Homo sapiens
CPPCP

SEQ ID NO: 9227 - protein, 9 aa, Homo sapiens
QQRSNWPLT

SEQ ID NO: 9228 - protein, 13 aa, Homo sapiens
ARDRGASRGAFNI

SEQ ID NO: 9229 - protein, 10 aa, Homo sapiens
QQYGSSPPIT

SEQ ID NO: 9230 - protein, 11 aa, Homo sapiens
AISSWYGFFQN

SEQ ID NO: 9231 - protein, 9 aa, Homo sapiens
QQYGSSPYT

SEQ ID NO: 9232 - protein, 15 aa, Homo sapiens
AREGGAYYYFYGMDV

SEQ ID NO: 9233 - protein, 9 aa, Homo sapiens
QQRSNWPFT

SEQ ID NO: 9234 - protein, 15 aa, Homo sapiens
ARGRPTDYYYYGVDV

SEQ ID NO: 9235 - protein, 9 aa, Homo sapiens
QQANSFPLT

SEQ ID NO: 9236 - protein, 13 aa, Homo sapiens
ARDSTLGRGYFDL

SEQ ID NO: 9237 - protein, 9 aa, Homo sapiens
QQRSNWPLT

SEQ ID NO: 9238 - protein, 13 aa, Homo sapiens
ARDRGASRGAFNI

SEQ ID NO: 9239 - protein, 9 aa, Homo sapiens
QQRSNWPLT

SEQ ID NO: 9240 - protein, 11 aa, Homo sapiens
AISSWYGFFQN

SEQ ID NO: 9241 - protein, 9 aa, Homo sapiens
QQRSNWPLT

SEQ ID NO: 9242 - protein, 15 aa, Homo sapiens
AREGGAYYYFYGMDV

SEQ ID NO: 9243 - protein, 10 aa, Homo sapiens
QQYGSSPPIT

SEQ ID NO: 9244 - protein, 13 aa, Homo sapiens
ARDRGASRGAFNI

SEQ ID NO: 9245 - protein, 10 aa, Homo sapiens
QQYGSSPPIT

SEQ ID NO: 9246 - protein, 11 aa, Homo sapiens
AISSWYGFFQN

SEQ ID NO: 9247 - protein, 10 aa, Homo sapiens
QQYGSSPPIT

SEQ ID NO: 9248 - protein, 15 aa, Homo sapiens
AREGGAYYYFYGMDV

SEQ ID NO: 9249 - protein, 9 aa, Homo sapiens
QQYGSSPYT

SEQ ID NO: 9250 - protein, 13 aa, Homo sapiens
ARDRGASRGAFNI

SEQ ID NO: 9251 - protein, 9 aa, Homo sapiens
QQYGSSPYT

SEQ ID NO: 9252 - protein, 11 aa, Homo sapiens
AISSWYGFFQN

SEQ ID NO: 9253 - protein, 9 aa, Homo sapiens
QQYGSSPYT

SEQ ID NO: 9254 - protein, 15 aa, Homo sapiens
AREGGAYYYFYGMDV
